(19) United States
(12) Patent Application Publication
(10) Pub. No.: US 2017/0362297 A1
(43) Pub. Date: Dec. 21, 2017

(54) CHIMERIC ANTIGEN RECEPTORS AND METHODS OF USE THEREOF

(71) Applicant: Dana-Farber Cancer Institute, Inc., Brookline, MA (US)

(72) Inventor: Wayne A. MARASCO, Wellesley, MA (US)

(21) Appl. No.: 15/537,779

(22) PCT Filed: Dec. 21, 2015
(86) PCT No.: PCT/US2015/067225

§ 371 Date: Jun. 19, 2017

Related U.S. Application Data
(60) Provisional application No. 62/094,625, filed on Dec. 19, 2014.
(60) Provisional application No. 62/252,083, filed on Nov. 6, 2015.

(51) Int. Cl. C07K 14/725; C07K 14/735; C07K 14/705; C07K 19/00

(52) U.S. Cl. CPC C07K 14/7051; C07K 19/00; C07K 14/70535; C07K 14/70521; C07K 14/70578; C07K 2319/02; C07K 2319/03

(57) ABSTRACT

The present invention provides chimeric antigen receptors, cells expressing same and methods of using same for treatment various disorders such as cancer.

### RELATED APPLICATIONS

[0001] This application claims priority to, and the benefit of U.S. Provisional Application No. 62/094,625 filed on Dec. 19, 2014, and U.S. Provisional Application No. 62/252,083 filed on Nov. 6, 2015, the contents of each of which are hereby incorporated in their entireties.

### GOVERNMENT INTEREST

[0002] This invention was made with government support under [ ] awarded by the [ ]. The government has certain rights in the invention.

### INCORPORATION-BY-REFERENCE OF SEQUENCE LISTING

[0003] The contents of the text file named, “Omnibus Sequence Listing for filing with DFCI-102_001WO_ST25”, which was created on Dec. 21, 2015, are hereby incorporated by reference in their entirety.

### FIELD OF THE INVENTION

[0004] The present invention relates generally to chimeric antigen receptor cells for and methods of using same for treatment cancer and other disorders.

### BACKGROUND OF THE INVENTION

[0005] T lymphocytes recognize specific antigens through interaction of the T cell receptor (TCR) with short peptides presented by major histocompatibility complex (MHC) class I or II molecules. For initial activation and clonal expansion, naive T cells are dependent on professional antigen-presenting cells (APCs) that provide additional co-stimulatory signals. TCR activation in the absence of co-stimulation can result in unresponsiveness and clonal anergy. To bypass immunization, different approaches for the derivation of cytotoxic effector cells with grafted recognition specificity have been developed. Chimeric antigen receptors (CARs) have been constructed that consist of binding domains derived from natural ligands or antibodies specific for cell-surface components of the TCR-associated CD3 complex. Upon antigen binding, such chimeric antigen receptors link to endogenous signaling pathways in the effector cell and generate activating signals similar to those initiated by the TCR complex. Since the first reports on chimeric antigen receptors, this concept has steadily been refined and the molecular design of chimeric receptors has been optimized. Aided by advances in recombinant antibody technology, chimeric antigen receptors targeted to a wide variety of antigens on the surface of cancer cells and of cells infected by human immunodeficiency virus (HIV) have been generated.

### SUMMARY OF THE INVENTION

[0006] In various aspects the invention provides a chimeric antigen receptor (CAR) having an intracellular signaling domain, a transmembrane domain and an extracellular domain.

[0007] In some aspects the transmembrane domain further includes a stalk region positioned between the extracellular domain and the transmembrane domain. The transmembrane domain includes CD28. In another aspect the CAR further includes one or more additional costimulatory molecules positioned between the transmembrane domain and the intracellular signaling domain. The costimulatory molecules is CD28, 4-1BB, ICOS, or OX40. The intracellular signaling domain is for example a CD3 zeta chain. The extracellular domain is an antibody such as a Fab or a scFV. Preferably the antibody is specific for BCMA, CA-9, CD138, CCR4, or the influenza virus.

[0008] Also included in the invention are nucleic acids encoding the CAR of the invention further including a nucleic acid encoding a polypeptide positioned after the intracellular signaling domain. The polypeptide is an antibody such as scFV. Preferably, the antibody is specific for CCR4, PD-1, PDL-1, PD-L2, CXCR4, or GITR. Also provided by the invention are vector including the nucleic acid according to the invention and cells including the vectors.

[0009] In yet a further aspect the invention provides a genetically engineered cell which express and bear on the cell surface membrane the chimeric antigen receptor of the invention. The cell is a T-cell or an NK cell. The T cell is CD4⁺ or CD8⁺. The cell is a mixed population of CD4⁺ and CD8 cells⁺. The cell is further engineered to express and secrete a polypeptide such as for example an antibody.

[0010] Unless otherwise defined, all technical and scientific terms used herein have the same meaning as commonly understood by one of ordinary skill in the art to which this invention pertains. Although methods and materials similar or equivalent to those described herein can be used in the practice of the present invention, suitable methods and materials are described below. All publications, patent applications, patents, and other references mentioned herein are expressly incorporated by reference in their entirety. In cases of conflict, the present specification, including definitions, will control. In addition, the materials, methods, and examples described herein are illustrative only and are not intended to be limiting.

[0011] Other features and advantages of the invention will be apparent from and encompassed by the following detailed description and claims.

### BRIEF DESCRIPTION OF THE DRAWINGS

[0012] FIG. 1. ADCC of CAIX-specific Abs. 1 μg/ml CAIX-specific scFv-Fc minibodies were added to the target tumor cells in the presence of human PBMC (E:T 25:1). Similar results were obtained in 2 experiments. Irrelevant anti-SARS scFv-Fc (11A) and anti-CCR4 scFv-Fc (48) minibodies were used as negative controls. A, CAIX+ sk-rc-09 cells; B, CAIX+ sk-rc-52 cells; C, CAIX− sk-rc-59 cells.

[0013] FIG. 2. Construction and expression of CAIX-specific CARs. A.

[0014] Construction: The 1^{st} generation CAR, scFv-CD8-TCR (CD8 CAR), is composed of a specific anti-CAIX scFv that is coupled to truncated human CD8α extracellular domain, hinge (H), transmembrane (TM) and intracellular regions, then to the signaling domain of human TCRζ. The 2^{nd} generation CAR, scFv-CD28-TCRζ (CD28 CAR), contains anti-CAIX scFv fused with human CD28 extracellular, TM and intracellular signaling domain to TCRζ. Both anti-CAIX CARs were cloned into a bicistronic self-inactivating (SIN) lentiviral vector with expression driven by an internal eF1-α promoter. The CAR control construct contains an irrelevant anti-HIV CCRS specific A8 scFv substitution. B. FACS analysis: Reporter gene ZsGreen was used to quantitate primary T cell transduction efficiency by the lentiviral CAR constructs. In addition, anti-CAIX scFv CARs were stained with CAIX-Fc fusion protein and C9-tag (TETSQVAPA) was stained with 1D4 antibody. Untransduced activated T-cells, LAK only were served as unstained cell control (i) or stained with 2^{nd} antibody (ii. PE-anti-human IgG and iii. APC-anti-mouse IgG) were used as staining controls. C. Western blot: Molecular sizes of monomer/dimer structures of anti-CAIX (clone G36) CD28 and anti-CCRS (clone A8) CD28 CARs, as well as endogenous TCRζ chain of untransduced T cells were indicated.

[0015] FIG. 3. Effector functions of CAIX-specific CARTs. A. Cytokine secretion. Anti-CAIX CART, irrelevant CART or activated control T cells (LAK) were cocultivated overnight with kidney cancer cell lines sk-rc-52 (CAIX+) and sk-rc-59 (CAIX−) for cytokine production. One representative out of 2-3 results is shown. B. ELISPOT. G36 CART or control A8 CART cells were added to tumor cells overnight. IFN-γ or granzyme B secreting T cells detected by ELISPOT. Similar results were obtained in 2-3 experiments. C. Specific anti-tumor cytotoxicity of CAIX-specific CART cells, control A8 CART cells or LAK cells were incubated in a 4-hour cytotoxicity assay at different amounts of target tumor cell at the ratios as indicated. One out of two experiments is shown. Clone 4-1 is a in vivo passaged subclone of sk-rc-52.

[0016] FIG. 4. Clonal expansion of CART cells after tumor contact. A. Proliferation. CAR-transduced T cells or untransduced T cells (LAK) were plated with irradiated tumor cells (CAIX+ sk-rc-52 & CAIX− sk-rc-59) weekly at three different ratios of tumor to T cells as indicated. Number of T cells was counted every 3-4 days in triplicate from two separate wells. Similar results were obtained in two experiments. B. Clonal enrichment. In tumor stimulation experiments, cultures from CART- and LAK cells were assayed on one week and two weeks by flow cytometry for expression of CART and T-cell subset. One representative of two results is shown.

[0017] FIG. 5. Regression of established human RCC xenografts by CART cells. Athymic null mice were inoculated subcutaneously with 7.5×10⁶ sk-rc-52 and 5×10⁶ sk-rc-59 RCC tumor cells at left and right flank respectively. After 6 days of tumor implantation, mice were injected i.v. with 50×10⁶ G36 CD28 CART cells, A8 CD28 CART cells (≧20% CAR+), LAK, or PBS alone. High dose of IL-2 (1×10⁵ U/ml) was injected every 2-3 days. Tumor size was measured by caliper every 2-3 days. Experiment 1, n=7 & Experiment 2, n=8. Tumor size of these two experiments was shown separately. +, p<0.05; *, p<0.01; **, p<0.001 in groups of G36 Tandem treated mice versus control no T cell treated mice in these two trials. Other statistic calculations are reported in the text.

[0018] FIG. 6. In vivo anti-tumor activity of CAR+ T-cells. A. Expression of ZsGreen by CART cells is shown in upper panel. CART cells were pre-stained with Far Red dye, cytospun and examined by fluorescent microscopy (lower panel). B. In situ staining of G36 CD28 CART cells in regressing tumor. CART-cells were i.v. injected into RCC established mice and tumor tissue was collected on day 1-3. Confocal microscopy was used to measure apoptosis of tumor cells by TUNNEL assay with PE-Cy5 dye (shown as red). Transduced T cells were shown by ZsGreen. Nuclei were counterstained with DPAI. Two representative slides were shown to indicate the apoptosis of tumor cells at the edge of tumor (upper panel) and inside the tumor bed (middle panel), respectively. The magnified image (lower panel) demonstrates CART cells interacted with multiple tumors while a few surrounding tumor cells were dying. C. Granzyme B+ T cells and tumor necrosis. After the treatment with CART cells, the regressing CAIX+ sk-rc-52 tumors were stained by granzyme B antibody (brown) and H&E. The higher magnification view (middle and lower panels of sections a and b in upper panel) shows the locations of granzyme B+ T cells (shown by arrows) and the corresponding H&E slide shows the tumor necrosis (shown by n). Granzyme B+ T cells are distributed at the edge of tumor (middle panel) and inside the tumor (lower panel).

[0019] FIG. 7. CAIX− sk-rc-52 tumors treated with control LAK cells showed negative granzyme B staining (left) (upper panel) and the corresponding histology was shown in H&E (right).

[0020] FIG. 8. Low background staining of granzyme B in CAIX− sk-rc-59 tumors treated with G36 CD28z CART cells

[0021] FIG. 9. Low background staining of granzyme B in CAIX− sk-rc-59 tumors treated with LAK cells.

[0022] FIG. 10. Positive control of granzyme B staining was performed on sk-rc-52 tumors which was local injected with G36 CD28z CART cells (left) and tumor morphology was shown in H&E (right).

[0023] FIG. 11 Expression of αCAIX CAR and αPD-L1 scFv-Fc transiently transfected 293T cells. 10⁶ of 293T cells were transfected with or without lentiviral pHAGE-EF1αG36-C9tag-CD28-CD3zeta-IRES-anti-PDL1 scFv-Fc (IgG4)-WPRE or the control pHAGE-EF1α-A716-C9tag-CD28-CD3zeta-IRES-ZsGreen-WPRE plasmids. Cells and supernatant were harvested at 24 and 48 hours post transfection. Left, purified CAIX(ECD)-Fc-Biotin and Streptavidin-APC were used for cell staining and flow cytometry analysis. Right, total human IgG in supernatant was quantitated with human IgG quantification kit.

[0024] FIG. 12 (A) Total PBMCs from 4 donors were stimulated with 50 ng/ml SEB and treated with 10 ug/ml anti-PDL1 (#42) sIgG4 or anti-influenza sIgG4. Restoration of IFNγ production (upper) or TNFa production (lower) was measured. (B) Parental anti-CCR4 antibody, c1567IgG, inhibited chemotaxis of Tregs to CCL22. (C) CD4⁺CD25⁻ T cells were CFSE-labeled, incubated with Tregs at 10:1 ratio, and then stimulated with anti-CCR4 mAb and control mAb in the presence of anti-CD3/28 co-stimulation. After 3 and 7 days cells were harvested and analyzed by flow cytometry. The percentage of cells was calculated among the fluorescence positive CD4⁺CD25⁻ T and counting beads. The percent proliferation was normalized to CD4⁺CD25⁻ T effector cells at Day 0. The data shown were calculated from two independent experiments. Bars represent mean±S.D. (D) IFNγ ELISpot analysis of mAb2-3 and control antibody treated CD4⁺CD25⁻ Teff cells. Data represents the quantification from three separate experiments using three individual donor bloods. (E) Left, CFSE-labeled Teffs (5×10⁴) and unlabeled Tregs (5×10³) were co-incubated with 20 μg/ml PHA in 96-well plates for 5 days. The CFSE-labeled Teffs were harvested and CFSE intensity was analyzed by flow cytometry. The proliferation of Teffs were only observed when the coculture incubated with anti-GITR mAb. Right, IFNγ production in the same cultures was further measured by MSD. CFSE-labeled Teffs (5×10⁴) and unlabeled Tregs (5×10³) were co-incubated with 20 μg/ml PHA in 96-well plates for 5 days. The CFSE-labeled Teffs were harvested and CFSE intensity was analyzed by flow cytometry. Teffs were proliferated after 5-day incubation with PHA, but not in the Teff/Treg coculture. Left, IFNγ production in the same cultures was measured by MSD.

[0025] FIG. 13 is an illustration showing different CART configurations according to the invention.

[0026] FIG. 14 is an illustration showing different armed CART configurations according to the invention.

[0027] FIG. 15 is a further illustration showing different armed CART configurations according to the invention.

[0028] FIG. 16 is a series of illustrations and graphs indicating chimeric antigen receptors (CAR) constructs for CD8+ T cell transduction. (A) Schematic representation of second generation pHAGE lentiviral vectors containing CD28 as a co-stimulatory domain. The anti-carbonic anhydrase IX (CAIX) or the Anti-B-cell maturation antigen (BCMA) scFv (as a negative control) were inserted after the eIFα promoter, in order to express the CAR binding domain. The second cassette, after the Internal Ribosome Entry Site (IRES) sequence, is responsible by coding the soluble Anti-PD-L1 IgG1 or IgG4 isotypes or the Anti-Severe Acute respiratory syndrome (SARS) coronavirus IgG1. To produce the lentiviruses, the pHAGE vectors were transfected together with the packaging plasmids (Gag, Rev, Tat and VSVG) into 293T LentiX cells using Polyethyleneimine. The viruses were harvested two days after transfection, purified and concentrated using LentiX Concentrator (Clontech™), according to the manufacturer instructions. LTR: long terminal repeat, eIFα: eukaryotic initiation factor alpha, scFv: single-chain variable fragment, C9 TAG: C9 peptide TETSQVAPA, IRES: Internal Ribosome Entry Site, WPRE: Woodchuck Hepatitis Virus Posttranscriptional Regulatory Element. (B) T cells were transduced with the lentiviruses to generate Anti-CAIX CART Cells, which are able to recognize CAIX positive RCC, and also release Anti-PD-L1 IgG1 or IgG4 in the tumor microenvironment to block PD-1/PD-L1-induced T cell exhaustion. (C) Percentage of CART cells 14 days after transduction, representing the stable long-term expression of CAR by the integrated lentiviruses in CD8+ T cells. The CD8+ T cells were selected using Dynabeads™ CD8 Positive isolation Kit (Life Technologies) and activated with Dynabeads™ Human T Cell Activator CD3/CD28 (Life Technologies) in the presence of IL-21 50 U/mL. IL-21 was added to the medium every 2 days. After 14 days, the CART cells were incubated with human CAIX-Fc or BCMA-Fc, followed by incubation with an APC conjugated anti-human Fc IgG and analyzed by FACS. (D) Concentration of IgG secreted to the medium of transduced T cells evaluated by Human IgG ELISA Quantitation Set (Bethyl Laboratories). (E) Concentration of Anti-PD-L1 antibodies in the supernatant of 293T Cells transduced with lentiviruses containing Anti-CAIX or Anti-BCMA CAR and Anti-PD-L1 IgG1, Anti-PD-L1 IgG4 or unspecific Anti-SARS IgG1 sequences. The antibodies in the supernatant were purified with Protein A sepharose beads (GE Healthcare) and biotinylated using the EZ-Link Sulfo-NHS-LC-Biotin (Thermo Scientific™). These antibodies were incubated with 5 μg/mL of human PD-L1 pre-immobilized in the 96 wells MaxiSorp plate (Nunc™). The biotinylated antibodies were detected by incubation with streptavidin-HRP for 1 h and developed with TMB. The absorbance was read at λ=450 nm. *P<0.001 compared to Anti BCMA/Anti SARS IgG1 and Anti-CAIX/Anti-SARS IgG1. **P<0.05 compared to Anti-CAIX/Anti-PD-L1 IgG1. (F and G) Clonal Expansion of CD8+ CART cells. (F) Concentration of CART cells versus days in the presence of skrc-52 CAIX+/PD-L1− cells. *P<0.05 comparing all CARS to Anti-BCMA/Anti-SARS IgG1. (G) Percentage of transduced T cells versus days in the presence of skrc-52 CAIX positive cells.*P<0.05 comparing all CARS to Anti-BCMA/Anti-SARS IgG1. The CD8+ CART cells were previously cultivated for five days after transduction with Anti CAIX CAR able to express anti-PD-L1 IgG1 (Anti-CAIX/Anti-PD-L1 IgG1), IgG4 (Anti-CAIX/Anti-PD-L1 IgG4) or a unspecific Anti-SARS Ab (Anti-CAIX/Anti SARS IgG1) or Anti-BCMA CAR (negative control) able to express an unspecific anti-SARS Ab (Anti-BCMA/Anti SARS IgG1) and activated with Dynabeads Human T Activator CD3/CD28 (Life Technologies) in the presence of IL-21 50 U/mL. The beads were removed and the CART cells were cultured with skrc52 CAIX+PD-L1− and IL-21 (50 U/mL), which was added to the medium every 2 days for 21 days. The results represent the average±SD of three donors in duplicate.

[0029] FIG. 17 is a series of graphs that illustrate CART cell effector function. (A) Viability of Skrc59 CAIX+/PD-L1+ cells or (B) Skrc52 CAIX−/PD-L1− cells incubated overnight (O.N.) with CART cells Anti-CAIX/Anti-PD-L1 IgG1, Anti-CAIX/Anti-PD-L1 IgG4, Anti-CAIX/Anti SARS IgG1 or Anti-BCMA/Anti SARS IgG1. These CART cells were used 4 days after lentiviral transduction. The cell viability was evaluated by MTT (Molecular Probes™). *P<0.05 for all CART cells compared to Anti BCMA/Anti SARS IgG1 (C) IL2 released by CART cells after overnight contact with Skrc59 CAIX+/PD-L1+ cells or (D) Skrc52 CAIX−/PD-L1− cells. The IL-2 secretion was evaluated using the Human IL-2 ELISA Ready-SET-Go Kit (eBioscience™). *P<0.001 for all CART cells compared to Anti BCMA/Anti SARS IgG1. (E) IFNγ released by CART cells after overnight contact with Skrc59 CAIX+/PD-L1+ or (F) Skrc52 CAIX−/PD-L1− cells. The IFNγ secretion was evaluated using the Human IFNγ ELISA Ready-SET-Go Kit (eBiosciences™). *P<0.05 for all CART cells compared to Anti-BCMA/Anti-SARS IgG1. (G) Ab-dependent cell-mediated cytotoxicity of skrc59 CAIX+/PD-L1+ or (H) skrc52 CAIX−/PD-L1− after incubation with the supernatant (SN) of CART cells containing 500 ng/mL of the Anti-PD-L1 IgG1, Anti-PD-L1 IgG4 or the Anti-SARS IgG1. To obtain the antibodies, CART cells were incubated for six days with Dynabeads Human T Activator CD3/CD28 (Life Technologies) in the presence of IL-21 50 U/mL. After 7 days, the medium containing the mAbs was harvested NK cells were purified using an EasySep™ Human NK Cell Enrichment Kit (StemCell Technologies). RCC cell lines Skrc59 CAIX+PD-L1+ and Skrc52 CAIX− PD-L1− were used as target cells and plated at 1.5×10³/well in a 96-well plate. RCC cells were incubated for 1 hour, 37° C., with 50 μL of the CART cells supernatant adjusted for 500 ng/mL of the respective Ab Anti-PD-L1 IgG1, Anti-PD-L1 IgG4 or Anti-SARS IgG1. After the incubation, the cells were washed with medium and incubated with 12.5:1, 25:1 or 50:1 NK cells for 4 h, 37° C. Culture supernatants were harvested by centrifugation and LDH measured in the supernatant by CytoTox 96® Non-Radioactive Cytotoxicity Assay (Promega™) at 490 nm. These results represent the average±SD of three donors in duplicate.

[0030] FIG. 18 is a series of graphs that depict CART cells expression of exhaustion markers. (A) Lag3, (B) Tim3 and (C) PD-1 expression. *P<0.05 compared to Anti-CAIX/Anti-SARS IgG1 and Anti-BCMA/Anti-SARS IgG1. The CD8+ CART cells were selected using Dynabeads™ CD8 Positive isolation Kit (Life Technologies), activated with Dynabeads™ Human T Activator CD3/CD28 (Life Technologies) and transduced with the following CARs: Anti-CAIX/Anti-PD-L1 IgG1, Anti-CAIX/Anti-PD-L1 IgG4, Anti-CAIX/Anti SARS IgG1 or Anti-BCMA/Anti SARS IgG1. These cells were cultured in the presence of IL-21 50 U/mL and Dynabeads Human T Activator CD3/CD28 for five days. After this period the CART cells were co-cultured with Skrc-59 CAIX+PD-L1+ for 2 days in order to stimulate exhaustion. CART cells were stained with FITC-conjugated anti-human PD-1, PE-conjugated anti-human Tim3 and PerCP/Cy5.5 anti-human Lag3 and analyzed by FACS. (D) Viability of Skrc59 CAIX positive/PD-L1 positive cells after incubation with exhausted CART cells. The cell viability was evaluated by MTT (Molecular Probes). *P<0.05 compared to both Anti-CAIX/Anti-SARS IgG1 and Anti-BCMA/Anti-SARS IgG1. **P<0.05 compared to Anti-CAIX/Anti-PD-L1 IgG1. These results represent the average±SD of three donors.

[0031] FIG. 19 is a series of images and graphs that depict the effect that CART cells have in an orthotopic model of human RCC. (A) NSG Mice (N=35) were injected with 5.0×104 skrc-59 CAIX positive, PD-L1 positive and luciferase positive RCC cells. After a week, the mice were injected with 1.0×107 CART or untransduced T cells IV (Day 0). The CART cells were previously transduced with the following lentiviral sequences: Anti-BCMA CAR/Anti-SARS IgG1, Anti-CAIX CAR/Anti SARS IgG1, Anti-CAIX CAR/Anti-PD-L1 IgG1 and Anti-CAIX CAR/Anti-PD-L1 IgG4 (N=6 mice per group). The tumor bioluminescence was quantified after 5 minutes of luciferin IP injection using IVIS. A. Imaging of the tumors before CART injection (Day 0), and after 7, 14, 23 and 30 days after first CART cells injection. A second injection of 2.5×106 cells was made on day 17. (B) Imaging of the tumors after excision at day 30. Scale bar=1 cm. (C) Tumor growth curve. *P<0.05 when Anti-PD-L1 IgG1 and IgG4 groups were compared to Anti-BCMA/Anti-SARS IgG1 and **P<0.05 when Anti-PD-L1 IgG1 and IgG4 groups were compared to Anti-CAIX/Anti-SARS IgG1. (D) Tumor weight after 30 days of treatment. *P<0.05 compared with Anti-BCMA/Anti SARS IgG1 CAR, **P<0.05 compared with Anti-CAIX/Anti-SARS IgG1.

[0032] FIG. 20 is a series of graphs and histological images that depict antitumor activity from CART cells. (A) Expression of exhaustion markers in tumor infiltrating lymphocytes (TIL). The kidney tumors from all mice were divided in two parts and one of them was fragmented in small pieces and digested with collagenase and DNAse to extraction of TIL. The CART cells were analyzed for the exhaustion markers PD-1, Tim-3 and Lag3. *P<0.05 compared with untransduced, Anti-BCMA/Anti SARS IgG1 CAR and Anti-CAIX/Anti-SARS IgG1. (B) Detection of Ki67 as a tumor cell proliferation marker and granzyme B to analyze CART cells activity in the tissue. Four-micrometer sections of formalin-fixed, paraffin-embedded tissues were dewaxed and rehydrated in a decreasing ethanol series. Endogenous peroxidase activity was quenched using 3% hydrogen peroxide. The antigen retrieval was performed using pressure cooker in citrate buffer (pH=6.0) for 45 seconds at 123° C., 15 PSI. The tissue sections were incubated for 45 minutes with the rabbit anti human Ki67 polyclonal Ab 1:2000 (Vector, VP-K451), mouse anti-human PD-L1 mAb 10.4 μg/mL (Clone 405.9A11) developed by Dr. Gordon Freeman (Boston, Mass.), biotinylated CAIX-Fc protein 17 μg/mL (produced in our lab), rabbit anti human granzyme B polyclonal Ab (Abcam, ab4059) 1:100 or rabbit anti-human NCAM (CD56) mAb 1:100 (Abcam, ab133345), followed by secondary HRP conjugated anti-rabbit Ab or HRP-Avidin. The slides were developed using 3,3′-diaminobenzidine (DAB) and counterstained with hematoxylin. The images were obtained in an Olympus BX51 microscopy using a DP71 digital camera (Olympus) and analyzed in the DP Controller Software (Olympus™). The scale bars represent the magnification of the images of each column [500 μm (40×), 100 μm (200×) or 50 μm (400×)].(C) A series of graphs present percentage quantification of TIL staining positive for Granzyme B, PD-L1-IHC, and Ki67. Also presented in (C) is a Ki67-DAB Pixel count of TILs.

[0033] FIG. 21 is a series of graphs that depict the evaluation of IL-2 versus IL-21 to CD8+ CART cells proliferation. A and B. Proliferation of CART transduced cells in the presence of IL-2 or IL-21 evaluated 48 h, 72 h and 120 h after transduction with lentiviruses. (A) Anti-CAIX CART cells or (B) Unspecific Anti-BCMA CART cells (both with ZsGreen in the second cassette). The CD8+ T cells were selected using Dynabeads™ CD8 Positive isolation Kit (Life Technologies) and activated with Dynabeads™ Human T Activator CD3/CD28 (Life Technologies) in the presence of IL2 or IL-21 50 U/mL (Peprotech™) The CART cells transduction was evaluated by ZsGreen expression using FACS. The data represents the average±SD of two donors. *p<0.05 comparing IL-21 with non treated control (Ctr); **p<0.05 comparing IL21 with IL-2. C and D. Viability of RCC cells treated with CD8+ CART cells cultivated in the presence of IL-2 or IL-21. The viability was evaluated by MTT after an overnight incubation of CART cells Anti-BCMA, Anti-CAIX or Untransduced T cells with (C) Skrc-59 CAIX+/PD-L1+ and (F) Skrc-52 CAIX−/PD-L1− RCC cells. The CART cells were previously cultivated in the presence of IL2 or IL-21 50 U/mL for 120 hours. These results represent the average±SD of two donors in triplicate. *P<0.05 comparing Anti-CAIX CAR with Anti-BCMA CAR or untransduced T cells.

[0034] FIG. 22 is a series of flow cytometry graphs that depict the expression of PD-1 and CAIX in the renal cell carcinoma (RCC) lines. (A) Negative control, (B) Skrc52 CAIX-PD-L1−, (C) Skrc52 CAIX+PD-L1−, (D) Skrc59 CAIX+PD-L1+. The cells were stained with Anti-human CAIX antibody developed with APC-Anti-human Fc IgG and Biotinylated Anti human PD-L1 antibody developed with PE-Avidin. The analysis was performed by FACS.

[0035] FIG. 23 is a series of graphs that depict the characterization of CART cells. (A) Proliferation of total CD8+ T cells two or four days after transduction Anti CAIX CAR/Anti-PD-L1 IgG1), (Anti-CAIX CAR/Anti-PD-L1 IgG4), Anti-CAIX CAR/Anti SARS IgG1) or Anti-BCMA CAR/Anti SARS IgG1). The CD8+ T cells were selected using Dynabeads™ CD8 Positive isolation Kit (Life Technologies) and activated with Dynabeads™ Human T Activator CD3/CD28 (Life Technologies) in the presence of IL-21 50 U/mL. IL-21 was added to the medium every 2 days. The proliferation was evaluated by FACS using Counting Beads (Molecular Probes). (B) Concentration of CAR-transduced T cells two and four days after transduction. The CART cells were incubated with human CAIX-Fc or BCMA-Fc, followed by incubation with an APC conjugated anti-human Fc IgG and analyzed by FACS. (C) Percentage of CART cells 2 and 4 days after transduction. The results represent the average±SD of three donors in duplicate.

[0036] FIG. 24 is a series of graphs that depict the effect that CART cells have in an orthotopic model of human RCC. (A) Comparison of tumor size detected by bioluminescence versus days among the CART cells groups. NSG Mice (N=35) were injected in the renal capsule with 5.0×104 skrc-59 CAIX+, PD-L1+ and luciferase+ RCC cells. After a week, the mice were injected with 1.0×107 CART or untransduced T cells IV. The CART cells were previously transduced with the following lentiviral sequences: Anti-BCMA CAR/Anti-SARS IgG1, Anti-CAIX CAR/Anti SARS IgG1, Anti-CAIX CAR/Anti-PD-L1 IgG1 and Anti-CAIX CAR/Anti-PD-L1 IgG4 (N=6 mice per group). The tumor bioluminescence was quantified after 5 minutes of luciferin IP injection using IVIS. In the Day 17, more 2.5×106 CART cells were injected. *P<0.05 compared to anti-BCMA CART cells. **P<0.05 compared to untransduced T cells, ***P<0.05 compared to Anti-CAIX/Anti-SARS IgG1. (B) Percentage of T cells in the mice blood after 8 days of treatment. *P<0.05 compared to untransduced T cells. **P<0.05 compared to all Anti-CAIX CARs. The red blood cells were lysed with ACK Lysing Buffer (Lonza™) and the remaining cells were stained with Pacific Blue conjugated Anti-human CD45 and analyzed by FACS. (C) Total tumor infiltrating lymphocytes (TIL) after 30 days of treatment with CART cells. The tumors and kidney from all mice were divided in two parts and one of them was fragmented in small pieces and digested with collagenase and DNAse to extraction of TIL. The cells were stained with Pacific Blue conjugated Anti-human CD45 and analyzed by FACS.

[0037] FIGS. 25A and 25B are a series of graphs and histological images that depict Human natural killer (NK) cells in the tumors treated with Anti-CAIX CART cells releasing anti-PD-L1 IgG1 Ab. (A) Percentage of CD56+ cells (NK marker) in the tumors. Two mice of each group were injected with 4.5×106 NK cells one day before the euthanasia. The kidney tumors from all mice were divided in two parts and one of them was fragmented in small pieces and digested with collagenase and DNAse to extraction of NK. NK cells present in the tumor were stained with APC-Anti-CD56 Ab and analyzed by FACS. *P<0.05. (B) CD56+ cells into the excised tumors detected by IHC and quantified using IHC Profiler Plugin of ImageJ Software. Four-micrometer sections of formalin-fixed, paraffin-embedded tissues were dewaxed and rehydrated in a decreasing ethanol series. Endogenous peroxidase activity was quenched using 3% hydrogen peroxide. The antigen retrieval was performed using pressure cooker in citrate buffer (pH=6.0) for 45 seconds at 123° C., 15 PSI. The tissue sections were incubated for 45 minutes with the rabbit anti-human CD56 mAb 1:100 (Abcam, ab133345), followed by secondary HRP conjugated anti-rabbit or anti-mouse Ab. The slides were developed using 3,3′-diaminobenzidine (DAB) and counterstained with hematoxylin. The images were obtained in an Olympus BX51 microscopy using a DP71 digital camera (Olympus) and analyzed in the DP Controller Software (Olympus). The quantification was performed using the IHC Profiler Plugin of ImageJ Software (23). The scale bars represent the magnification of the images (400×). *P<0.05 compared with untransduced, **P<0.05 compared with untransduced and Anti-BCMA/Anti-SARS IgG1.

### DETAILED DESCRIPTION OF THE INVENTION

[0038] The present invention relates to a chimeric antigen receptor (CAR) particularly adapted to immune cells used in immunotherapy.

[0039] In one embodiment, a double immunotherapeutic strategy is described based on the blocking of T cell exhaustion using anti-PD-L1 antibodies secreted by targeted anti-CAIX CAR T cells combined in a single lentivirus construct for improving cancer treatment.

[0040] An emerging mechanism associated with the progression of RCC and other tumors is the immune checkpoint pathway, which consists in cellular interactions that prevent excessive activation of T cells under normal conditions, allowing T cell function in a self-limited manner. As an evasion mechanism, many tumors are able to stimulate the expression of immune checkpoint molecules, resulting in an anergic phenotype of T cells that cannot restrain tumor progression. Emerging clinical data highlight the importance of one inhibitory ligand and receptor pair as an immune checkpoint: the programmed death-ligand 1 (PD-L1; B7-H1 and CD274) and programmed death receptor-1 (PD-1; CD279), in preventing killing of cancer cells by cytotoxic T-lymphocytes. PD1 receptor is expressed by many cell types like T cells, B cells, Natural Killer cells (NK) and host tissues. Tumors and Antigen-presenting cells (APC) expressing PD-L1 can block T cell receptor (TCR) signaling of cytotoxic T-lymphocytes through binding to receptor PD-1, decreasing the production of cytokines and T cell proliferation. PD-L1 overexpression can be found in many tumor types and may also mediate an immunosuppressive function through its interaction with other proteins, including CD80 (B7.1), blocking its ability to activate T cells through binding to CD28.

[0041] Genetic engineering of human lymphocytes to express tumor-directed chimeric antigen receptors (CAR) can produce antitumor effector cells that bypass tumor immune escape mechanisms that are due to abnormalities in protein-antigen processing and presentation. Moreover, these transgenic receptors can be directed to tumor-associated antigens that are not protein-derived. In certain embodiments of the invention there are lymphocytes (CARTS) that are modified to comprise at least a CAR, and in particular embodiments of the invention a single CAR targets two or more antigens. In preferred embodiments, the CARTS are further modified to express and secrete one or more polypeptides, such as for example an antibody or a cytokine. Such CARTS are referred to herein as armed CARTS. Armed CARTS allow for simultaneous secretion of the polypeptide locally at the targeted site (i.e., tumor site).

[0042] A modified TCR called chimeric antigen receptor (CAR) containing single chain variable antibody fragment (scFv) previously selected by high affinity against a specific tumor associated antigen is a powerful new approach against cancer. The scFv presented in the CAR is linked to an intracellular signaling block that includes CD3 to induce T cell activation followed by antigen binding. This structure is characteristic for first-generation CARs, which were improved to second- and generation CARs that link the signaling co-stimulatory endodomains of CD28, 4-1BB, or OX40 to CD3 or 3^{rd}-generation CARs that links two elements to CD3ζ in tandem. These endodomains are required for complete T cell activation during TCR recognition by antigen-presenting cells (APCs), improving cytokine production and proliferation of CAR-T cells. The effect of CART cells has heretofore been modest for the treatment of solid tumors, due to difficulty in finding unique tumor associated antigens, inefficient homing of T cells to tumor locations, low persistence of T cells in the body and the immunosuppressive microenvironment of solid tumors.

[0043] In particular cases, the lymphocytes include a receptor that is chimeric, non-natural and engineered at least in part by the hand of man. In particular cases, the engineered chimeric antigen receptor (CAR) has one, two, three, four, or more components, and in some embodiments the one or more components facilitate targeting or binding of the lymphocyte to one or more tumor antigen-comprising cancer cells.

[0044] The CAR according to the invention generally comprises at least one transmembrane polypeptide comprising at least one extracellular ligand-biding domain and; one transmembrane polypeptide comprising at least one intracellular signaling domain; such that the polypeptides assemble together to form a Chimeric Antigen Receptor.

[0045] The term “extracellular ligand-binding domain” as used herein is defined as an oligo- or polypeptide that is capable of binding a ligand. Preferably, the domain will be capable of interacting with a cell surface molecule. For example, the extracellular ligand-binding domain may be chosen to recognize a ligand that acts as a cell surface marker on target cells associated with a particular disease state.

[0046] In particular, the extracellular ligand-binding domain can comprise an antigen binding domain derived from an antibody against an antigen of the target.

[0047] As non limiting examples, the antigen of the target can be a tumor-associated surface antigen, such as ErbB2 (HER2/neu), carcinoembryonic antigen (CEA), epithelial cell adhesion molecule (EpCAM), epidermal growth factor receptor (EGFR), EGFR variant III (EGFRvIII), CD19, CD20, CD30, CD40, disialoganglioside GD2, ductal-epithelial mucine, gp36, TAG-72, glycosphingolipids, glioma-associated antigen, .beta.-human chorionic gonadotropin, alphafetoprotein (AFP), lectin-reactive AFP, thyroglobulin, RAGE-1, MN-CA IX, human telomerase reverse transcriptase, RU1, RU2 (AS), intestinal carboxyl esterase, mut hsp70-2, M-CSF, prostase, prostase specific antigen (PSA), PAP, NY-ESO-1, LAGA-1a, p53, prostein, PSMA, surviving and telomerase, prostate-carcinoma tumor antigen-1 (PCTA-1), MAGE, ELF2M, neutrophil elastase, ephrin B2, CD22, insulin growth factor (IGF1)-I, IGF-II, IGFI receptor, mesothelia, a major histocompatibility complex (MHC) molecule presenting a tumor-specific peptide epitope, 5T4, ROR1, Nkp30, NKG2D, tumor stromal antigens, the extra domain A (EDA) and extra domain B (EDB) of fibronectin and the A1 domain of tenascin-C(TnC A1) and fibroblast associated protein (fap); a lineage-specific or tissue specific antigen such as CD3, CD4, CD8, CD24, CD25, CD33, CD34, CD133, CD138, CTLA-4, B7-1 (CD80), B7-2 (CD86), endoglin, a major histocompatibility complex (MHC) molecule, BCMA (CD269, TNFRSF 17), or a virus-specific surface antigen such as an HIV-specific antigen (such as HIV gp120); an EBV-specific antigen, a CMV-specific antigen, a HPV-specific antigen, a Lasse Virus-specific antigen, an Influenza Virus-specific antigen as well as any derivate or variant of these surface markers.

[0048] Preferably, the CAR is specific for BMCA, CAIX, CCR4, PD-L1, PD-L2, PD1, Glucocorticoid-Induced Tumor Necrosis Factor Receptors (GITR), Severe acute respiratory syndrome (SARS), influenza, flavivirus or Middle East Respiratory Syndrome (MERS).

[0049] In a preferred embodiment, said extracellular ligand-binding domain is a single chain antibody fragment (scFv) comprising the light (V_{L}) and the heavy (V_{H}) variable fragment of a target antigen specific monoclonal antibody joined by a flexible linker.

[0050] In a more preferred embodiment, said scFv antibody is specific for BMCA, CAIX, CCR4, PD-L1, PD-L2, PD1, GITR, SARS, influenza, flavivirus or MERS.

[0051] Exemplary antibodies useful in constructing the CAR according to the invention includes antibodies disclosed in for example: WO/2005/060520, WO/2006/089141, WO/2007/065027, WO/2009/086514, WO/2009/079259, WO/2011/153380, WO/2014/055897, WO 2015/143194, WO 2015/164865, WO 2013/166500, and WO 2014/144061; PCT/US2015/054202, PCT/US2015/054010 and 62/144,729 the contents of which are hereby incorporated by reference in their entireties.

[0052] PDLL (68)

[0053] Exemplary anti-PDL1 antibodies include antibodies having containing a _{VH} nucleotide sequence having SEQ ID NO: 1485 and a _{VL} nucleotide sequence having SEQ ID NO: 1487; a VH nucleotide sequence having SEQ ID NO: 1485 and a VL nucleotide sequence having SEQ ID NO: 1487; a VH nucleotide sequence having SEQ ID NO: 1489 and a VL nucleotide sequence having SEQ ID NO: 1491; a VH nucleotide sequence having SEQ ID NO: 1493 and a VL nucleotide sequence having SEQ ID NO: 1495; a VH nucleotide sequence having SEQ ID NO: 1497 and a VL nucleotide sequence having SEQ ID NO: 1499; a VH nucleotide sequence having SEQ ID NO: 1501 and a VL nucleotide sequence having SEQ ID NO: 1503; a VH nucleotide sequence having SEQ ID NO: 1505 and a VL nucleotide sequence having SEQ ID NO: 1507; a VH nucleotide sequence having SEQ ID NO: 1509 and a VL nucleotide sequence having SEQ ID NO: 1511; a VH nucleotide sequence having SEQ ID NO: 1513 and a VL nucleotide sequence having SEQ ID NO: 1515; a VH nucleotide sequence having SEQ ID NO: 1517 and a VL nucleotide sequence having SEQ ID NO: 1519; a VH nucleotide sequence having SEQ ID NO: 1521 and a VL nucleotide sequence having SEQ ID NO: 1523; a VH nucleotide sequence having SEQ ID NO: 1525 and a VL nucleotide sequence having SEQ ID NO: 1527; a VH nucleotide sequence having SEQ ID NO: 1529 and a VL nucleotide sequence having SEQ ID NO: 1531; a VH nucleotide sequence having SEQ ID NO: 1533 and a VL nucleotide sequence having SEQ ID NO: 1535; a VH nucleotide sequence having SEQ ID NO: 1537 and a VL nucleotide sequence having SEQ ID NO: 1539.

[0054] Exemplary anti-PDL1 antibodies include antibodies having containing a _{VH} amino acid sequence having SEQ ID NO: 970 and a _{VL} amino acid sequence having SEQ ID NO: 971; a VH amino acid having SEQ ID NO: 1486 and a VL polypeptide sequence having SEQ ID NO: 1488 a VH amino acid having SEQ ID NO: 1490 and a VL polypeptide sequence having SEQ ID NO: 1492 a VH amino acid having SEQ ID NO: 1494 and a VL polypeptide sequence having SEQ ID NO: 1496 a VH amino acid having SEQ ID NO: 1498 and a VL polypeptide sequence having SEQ ID NO: 1500 a VH amino acid having SEQ ID NO: 1502 and a VL polypeptide sequence having SEQ ID NO: 1504 a VH amino acid having SEQ ID NO: 1506 and a VL polypeptide sequence having SEQ ID NO: 1508 a VH amino acid having SEQ ID NO: 1510 and a VL polypeptide sequence having SEQ ID NO: 1512 a VH amino acid having SEQ ID NO: 1514 and a VL polypeptide sequence having SEQ ID NO: 1516 a VH amino acid having SEQ ID NO: 1518 and a VL polypeptide sequence having SEQ ID NO: 1520 a VH amino acid having SEQ ID NO: 1522 and a VL polypeptide sequence having SEQ ID NO: 1524 a VH amino acid having SEQ ID NO: 1526 and a VL polypeptide sequence having SEQ ID NO: 1528 a VH amino acid having SEQ ID NO: 1530 and a VL polypeptide sequence having SEQ ID NO: 1532 a VH amino acid having SEQ ID NO: 1534 and a VL polypeptide sequence having SEQ ID NO: 1536 a VH amino acid having SEQ ID NO: 1538 and a VL polypeptide sequence having SEQ ID NO: 1540.

[0055] In other embodiments the anti-PDL1 antibodies have a heavy chain with three CDRs including the amino acid sequences SEQ ID NO: 1541, 1554, 1569 respectively and a light chain with three CDRs including the amino acid sequences 1584, 1599, 1610 respectively; or a heavy chain with three CDRs comprising the amino acid sequences 1543, 1556, 1571 and a light chain with three CDRs comprising the amino acid sequences 1586, 1600, 1612; or a heavy chain with three CDRs comprising the amino acid sequences 1544, 1557, 1572 and a light chain with three CDRs comprising the amino acid sequences 1587, 1601, 1613; or a heavy chain with three CDRs comprising the amino acid sequences 1545, 1558, 1573 and a light chain with three CDRs comprising the amino acid sequences 1588, 1602, 1614; or a heavy chain with three CDRs comprising the amino acid sequences 1546, 1559, 1574 and a light chain with three CDRs comprising the amino acid sequences 1589, 1603, 1615; or a heavy chain with three CDRs comprising the amino acid sequences 1547, 1560, 1575 and a light chain with three CDRs comprising the amino acid sequences 1590, 1604, 1616; or a heavy chain with three CDRs comprising the amino acid sequences 1548, 1561, 1576 and a light chain with three CDRs comprising the amino acid sequences 1591, 1605, 1617; or a heavy chain with three CDRs comprising the amino acid sequences 1541, 1562, 1577 and a light chain with three CDRs comprising the amino acid sequences 1592, 1599, 1618; or a heavy chain with three CDRs comprising the amino acid sequences 1549, 1563, 1578 and a light chain with three CDRs comprising the amino acid sequences 1593, 1606, 1619; or a heavy chain with three CDRs comprising the amino acid sequences 1550, 1564, 1579 and a light chain with three CDRs comprising the amino acid sequences 1594, 1607, 1620; or a heavy chain with three CDRs comprising the amino acid sequences 1551, 1565, 1580 and a light chain with three CDRs comprising the amino acid sequences 1595, 1599, 1621; or a heavy chain with three CDRs comprising the amino acid sequences 1542, 1566, 1581 and a light chain with three CDRs comprising the amino acid sequences 1596, 1599, 1622; or a heavy chain with three CDRs comprising the amino acid sequences 1552, 1567, 1582 and a light chain with three CDRs comprising the amino acid sequences 1597, 1608, 1623; or a heavy chain with three CDRs comprising the amino acid sequences 1553, 1568, 1583 and a light chain with three CDRs comprising the amino acid sequences 1598, 1609 1624.

[0056] SARS (26)

[0057] Exemplary SARS neutralizing antibodies include antibodies having containing a _{VH} nucleotide sequence having SEQ ID NO: 1626 and a _{VL} nucleotide sequence having SEQ ID NO: 1628; a VH nucleotide sequence having SEQ ID NO: 1630 and a VL nucleotide sequence having SEQ ID NO: 1639; a VH nucleotide sequence having SEQ ID NO: 1634 and a VL nucleotide sequence having SEQ ID NO: 1640; a VH nucleotide sequence having SEQ ID NO: 1632 and a VL nucleotide sequence having SEQ ID NO: 1641; a VH nucleotide sequence having SEQ ID NO: 1633 and a VL nucleotide sequence having SEQ ID NO: 1642; a VH nucleotide sequence having SEQ ID NO: 1634 and a VL nucleotide sequence having SEQ ID NO: 1643; a VH nucleotide sequence having SEQ ID NO: 1635 and a VL nucleotide sequence having SEQ ID NO: 1644; a VH nucleotide sequence having SEQ ID NO: 1636 and a VL nucleotide sequence having SEQ ID NO: 1645; a VH nucleotide sequence having SEQ ID NO: 1637 and a VL nucleotide sequence having SEQ ID NO: 1646

[0058] CXCR4 (33)

[0059] Exemplary anti-CXCR4 antibody include antibodies having a VH amino acid sequence having SEQ ID NO: 771 and a VL amino acid sequence having SEQ ID NO: 779; a VH amino acid sequence having SEQ ID NO: 772 and a VL amino acid sequence having SEQ ID NO: 780; a VH amino acid sequence having SEQ ID NO: 773 and a VL amino acid sequence having SEQ ID NO: 781; a VH amino acid sequence having SEQ ID NO: 774 and a VL amino acid sequence having SEQ ID NO: 782; a VH amino acid sequence having SEQ ID NO: 775 and a VL amino acid sequence having SEQ ID NO: 783; a VH amino acid sequence having SEQ ID NO: 776 and a VL amino acid sequence having SEQ ID NO: 784; a VH amino acid sequence having SEQ ID NO: 777 and a VL amino acid sequence having SEQ ID NO: 785; or a VH amino acid sequence having SEQ ID NO: 778 and a VL amino acid sequence having SEQ ID NO: 786.

[0060] In other embodiments the anti-CXCR4 antibodies have a heavy chain with three CDRs including the amino acid sequences SEQ ID NO: 803, 804, 805 respectively and a light chain with three CDRs including the amino acid sequences 806, 807, 808 respectively; or a heavy chain with three CDRs comprising the amino acid sequences 809, 810, 811, respectively and a light chain with three CDRs comprising the amino acid sequences 812, 813, 814, respectively; or a heavy chain with three CDRs comprising the amino acid sequences 815, 816, 817 respectively and a light chain with three CDRs comprising the amino acid sequences 818, 819, 820 respectively; or a heavy chain with three CDRs comprising the amino acid sequences 827, 828, 829 respectively and a light chain with three CDRs comprising the amino acid sequences 830, 831, 832 respectively; or a heavy chain with three CDRs comprising the amino acid sequences 833, 834, 835, respectively and a light chain with three CDRs comprising the amino acid sequences 836, 837, 838, respectively; or a heavy chain with three CDRs comprising the amino acid sequences 839, 840, 841 respectively and a light chain with three CDRs comprising the amino acid sequences 842, 843, 844 respectively.

[0061] Carbonic Anhydrase IX (40)

[0062] Exemplary anti-CA IX antibodies include antibodies having containing a _{VH} amino acid sequence having SEQ ID NO: 845 and a _{VL} amino acid sequence having SEQ ID NO: 846; a VH amino acid sequence having SEQ ID NO: 847 and a VL amino acid sequence having SEQ ID NO: 868; a VH amino acid sequence having SEQ ID NO: 848 and a VL amino acid sequence having SEQ ID NO: 869; a VH amino acid sequence having SEQ ID NO: 849 and a VL amino acid sequence having SEQ ID NO: 870; a VH amino acid sequence having SEQ ID NO: 850 and a VL amino acid sequence having SEQ ID NO: 871; a VH amino acid sequence having SEQ ID NO: 851 and a VL amino acid sequence having SEQ ID NO: 872; a VH amino acid sequence having SEQ ID NO: 852 and a VL amino acid sequence having SEQ ID NO: 873; a VH amino acid sequence having SEQ ID NO: 853 and a VL amino acid sequence having SEQ ID NO: 874; a VH amino acid sequence having SEQ ID NO: 854 and a VL amino acid sequence having SEQ ID NO: 875; a VH amino acid sequence having SEQ ID NO: 855 and a VL amino acid sequence having SEQ ID NO: 876; a VH amino acid sequence having SEQ ID NO: 856 and a VL amino acid sequence having SEQ ID NO: 877; a VH amino acid sequence having SEQ ID NO: 857 and a VL amino acid sequence having SEQ ID NO: 878; a VH amino acid sequence having SEQ ID NO: 858 and a VL amino acid sequence having SEQ ID NO: 879; a VH amino acid sequence having SEQ ID NO: 859 and a VL amino acid sequence having SEQ ID NO: 880; a VH amino acid sequence having SEQ ID NO: 860 and a VL amino acid sequence having SEQ ID NO: 881; a VH amino acid sequence having SEQ ID NO: 861 and a VL amino acid sequence having SEQ ID NO: 882 a VH amino acid sequence having SEQ ID NO: 862 and a VL amino acid sequence having SEQ ID NO: 883; a VH amino acid sequence having SEQ ID NO: 863 and a VL amino acid sequence having SEQ ID NO: 884; a VH amino acid sequence having SEQ ID NO: 864 and a VL amino acid sequence having SEQ ID NO: 885; a VH amino acid sequence having SEQ ID NO: 865 and a VL amino acid sequence having SEQ ID NO: 886; a VH amino acid sequence having SEQ ID NO: 866 and a VL amino acid sequence having SEQ ID NO: 887; a VH amino acid sequence having SEQ ID NO: 867 and a VL amino acid sequence having SEQ ID NO: 888.

[0063] In other embodiments the anti-CA IX antibodies have a heavy chain with three CDRs including the amino acid sequences SEQ ID NO: 803, 804, 805 respectively and a light chain with three CDRs including the amino acid sequences 806, 807, 808 respectively; or a heavy chain with three CDRs comprising the amino acid sequences 899, 915, 909 and a light chain with three CDRs comprising the amino acid sequences 905, 906, 952 or a heavy chain with three CDRs comprising the amino acid sequences 899, 915, 909 and a light chain with three CDRs comprising the amino acid sequences 935, 943, 953 or a heavy chain with three CDRs comprising the amino acid sequences 899, 915, 909 and a light chain with three CDRs comprising the amino acid sequences 935, 906, 954 or a heavy chain with three CDRs comprising the amino acid sequences 910, 916, 923 and a light chain with three CDRs comprising the amino acid sequences 936, 944, 955 or a heavy chain with three CDRs comprising the amino acid sequences 899, 915, 909 and a light chain with three CDRs comprising the amino acid sequences 936, 944, 956 or a heavy chain with three CDRs comprising the amino acid sequences 911, 917, 924 and a light chain with three CDRs comprising the amino acid sequences 937, 945, 957 or a heavy chain with three CDRs comprising the amino acid sequences 899, 915, 909 and a light chain with three CDRs comprising the amino acid sequences 935, 946, 958 or a heavy chain with three CDRs comprising the amino acid sequences 899, 915, 909 and a light chain with three CDRs comprising the amino acid sequences 938, 946, 959 or a heavy chain with three CDRs comprising the amino acid sequences 899, 915, 909 and a light chain with three CDRs comprising the amino acid sequences 905, 946, 960 or a heavy chain with three CDRs comprising the amino acid sequences 899, 918, 925 and a light chain with three CDRs comprising the amino acid sequences 937, 947, 955 or a heavy chain with three CDRs comprising the amino acid sequences 899, 918, 926 and a light chain with three CDRs comprising the amino acid sequences 937, 945, 957 or a heavy chain with three CDRs comprising the amino acid sequences 912, 919, 927 and a light chain with three CDRs comprising the amino acid sequences 937, 943, 961 or a heavy chain with three CDRs comprising the amino acid sequences 899, 918, 928 and a light chain with three CDRs comprising the amino acid sequences 937, 906, 960 or a heavy chain with three CDRs comprising the amino acid sequences 899, 918, 928 and a light chain with three CDRs comprising the amino acid sequences 937, 906, 960 or a heavy chain with three CDRs comprising the amino acid sequences 913, 920, 929 and a light chain with three CDRs comprising the amino acid sequences 939, 948, 962 or a heavy chain with three CDRs comprising the amino acid sequences 899, 918, 930 and a light chain with three CDRs comprising the amino acid sequences 935, 944, 955 or a heavy chain with three CDRs comprising the amino acid sequences 899, 921, 931 and a light chain with three CDRs comprising the amino acid sequences 935, 944, 955 or a heavy chain with three CDRs comprising the amino acid sequences 912, 919, 932 and a light chain with three CDRs comprising the amino acid sequences 940, 949, 963 or a heavy chain with three CDRs comprising the amino acid sequences 899, 915, 909 and a light chain with three CDRs comprising the amino acid sequences 935, 943, 960 or a heavy chain with three CDRs comprising the amino acid sequences 914, 922, 933 and a light chain with three CDRs comprising the amino acid sequences 941, 950, 964 or a heavy chain with three CDRs comprising the amino acid sequences 912, 918, 934 and a light chain with three CDRs comprising the amino acid sequences 942, 951, 965.

[0064] Cc-Chemokine Receptor 4 (Ccr4) (048)

[0065] Exemplary CC-chemokine receptor 4 (CCR4) antibodies include antibodies having containing a _{VH} nucleotide sequence having SEQ ID NO: 969 and a _{VL} nucleotide sequence having SEQ ID NO: 971; a _{VH} nucleotide sequence having SEQ ID NO: 969 and a V_{L} nucleotide sequence having SEQ ID NO: 972.

[0066] Exemplary CCR4 antibodies include antibodies having containing a _{VH} amino acid sequence having SEQ ID NO: 970 and a V_{L} amino acid sequence having SEQ ID NO: 971.

[0067] In other embodiments the CCR4 antibodies have a heavy chain with three CDRs including the amino acid sequences SEQ ID NO: 973, 974, 975 respectively and a light chain with three CDRs including the amino acid sequences 976, 977, 978 respectively.

[0068] Middle East Respiratory Syndrome Coronavirus (MERS-CoV). (85)

[0069] Exemplary anti-Middle East Respiratory Syndrome coronavirus (MERS-CoV) antibody include antibodies having a VH nucleotide sequence having SEQ ID NO: 677and a VL nucleotide sequence having SEQ ID NO:679; a VH nucleotide sequence having SEQ ID NO: 681and a VL nucleotide sequence having SEQ ID NO:683; a VH nucleotide sequence having SEQ ID NO: 685and a VL nucleotide sequence having SEQ ID NO:687; a VH nucleotide sequence having SEQ ID NO: 689and a VL nucleotide sequence having SEQ ID NO:692; a VH nucleotide sequence having SEQ ID NO: 693and a VL nucleotide sequence having SEQ ID NO:695; a VH nucleotide sequence having SEQ ID NO: 697and a VL nucleotide sequence having SEQ ID NO:699; and a VH nucleotide sequence having SEQ ID NO: 701and a VL nucleotide sequence having SEQ ID NO:703.

[0070] Exemplary anti-Middle East Respiratory Syndrome coronavirus (MERS-CoV) antibody include antibodies having a VH amino acid sequence SEQ ID NO: 678 and a VL amino acid sequence having SEQ ID NO: 680; a VH amino acid sequence SEQ ID NO: 682 and a VL amino acid sequence having SEQ ID NO: 684; a VH amino acid sequence SEQ ID NO: 686 and a VL amino acid sequence having SEQ ID NO: 688; a VH amino acid sequence SEQ ID NO: 690 and a VL amino acid sequence having SEQ ID NO: 692; a VH amino acid sequence SEQ ID NO: 694 and a VL amino acid sequence having SEQ ID NO: 696; a VH amino acid sequence SEQ ID NO: 698 and a VL amino acid sequence having SEQ ID NO: 700; and a VH amino acid sequence SEQ ID NO: 702 and a VL amino acid sequence having SEQ ID NO: 704.

[0071] In other embodiments the anti-Middle East Respiratory Syndrome coronavirus (MERS-CoV) antibody has a heavy chain with three CDRs including the amino acid sequences of 705, 706, and 707 and a light chain with three CDRs including the amino acid sequences 722, 723, and 724; a heavy chain with three CDRs including the amino acid sequences of 708, 709, and 710 and a light chain with three CDRs including the amino acid sequences 725, 726, and 727; a heavy chain with three CDRs including the amino acid sequences of 711, 712, and 713 and a light chain with three CDRs including the amino acid sequences 728, 729, and 730; a heavy chain with three CDRs including the amino acid sequences of 711, 735, and 715 and a light chain with three CDRs including the amino acid sequences 731, 732, and 733; a heavy chain with three CDRs including the amino acid sequences of 711, 735, and 716 and a light chain with three CDRs including the amino acid sequences 737, 738, and 739; a heavy chain with three CDRs including the amino acid sequences of 717, 718, and 719 and a light chain with three CDRs including the amino acid sequences 736, 742, and 743; and a heavy chain with three CDRs including the amino acid sequences of 714, 720, and 721 and a light chain with three CDRs including the amino acid sequences 740, 729, and 741.

[0072] GITR (93)

[0073] Exemplary anti-human GITR antibody include antibodies having a VH nucleotide sequence having SEQ ID NO: 1361 and a VL nucleotide sequence having SEQ ID NO: 1363; a VH nucleotide sequence having SEQ ID NO: 1365 and a VL nucleotide sequence having SEQ ID NO:1367; a VH nucleotide sequence having SEQ ID NO: 1369 and a VL nucleotide sequence having SEQ ID NO: 1371; a VH nucleotide sequence having SEQ ID NO: 1381 and a VL nucleotide sequence having SEQ ID NO: 1375; a VH nucleotide sequence having SEQ ID NO: 1377 and a VL nucleotide sequence having SEQ ID NO: 1379; a VH nucleotide sequence having SEQ ID NO: 1381 and a VL nucleotide sequence having SEQ ID NO: 1383; a VH nucleotide sequence having SEQ ID NO: 1385 and a VL nucleotide sequence having SEQ ID NO: 1387; a VH nucleotide sequence having SEQ ID NO: 1389 and a VL nucleotide sequence having SEQ ID NO:1391; a VH nucleotide sequence having SEQ ID NO: 1393 and a VL nucleotide sequence having SEQ ID NO: 1395; a VH nucleotide sequence having SEQ ID NO: 1397 and a VL nucleotide sequence having SEQ ID NO: 1398; or a VH nucleotide sequence having SEQ ID NO: 1401and a VL nucleotide sequence having SEQ ID NO: 1403.

[0074] Exemplary anti-human GITR antibody include antibodies having a VH amino acid sequence having SEQ ID NO: 1362 and a VL amino acid sequence having SEQ ID NO: 1364; a VH amino acid having SEQ ID NO: 1366 and a VL polypeptide sequence having SEQ ID NO:1368; a VH amino acid sequence having SEQ ID NO: 1371 and a VL amino acid sequence having SEQ ID NO: 1372; a VH amino acid sequence having SEQ ID NO: 1382 and a VL amino acid sequence having SEQ ID NO: 1376; a VH nucleotide sequence having SEQ ID NO: 1378 and a VL nucleotide sequence having SEQ ID NO: 1380; a VH amino acid having SEQ ID NO: 1382 and a VL polypeptide sequence having SEQ ID NO: 1384; a VH amino acid sequence having SEQ ID NO: 1386 and a VL amino acid sequence having SEQ ID NO: 1388; a VH amino acid sequence having SEQ ID NO: 1390 and a VL amino acid sequence having SEQ ID NO: 1392; a VH amino acid having SEQ ID NO: 1394 and a VL polypeptide sequence having SEQ ID NO: 1396; a VH amino acid sequence having SEQ ID NO: 1399 and a VL amino acid sequence having SEQ ID NO: 1400; or a VH amino acid sequence having SEQ ID NO: 1402 and a VL amino acid sequence having SEQ ID NO: 1404.

[0075] In other embodiments the anti-human GITR antibody has a heavy chain with three CDRs including the amino acid sequences 1405, 1406, and 1407 and a light chain with three CDRs including the amino acid sequences1408, 1409, and 1410 respectively; a heavy chain with three CDRs including the amino acid sequences 1411, 1412, and 1413 and a light chain with three CDRs including the amino acid sequences1414, 1415, and 1416 respectively; a heavy chain with three CDRs including the amino acid sequences 1417, 1418, and 1419 and a light chain with three CDRs including the amino acid sequences1420, 1421, and 1422 respectively; a heavy chain with three CDRs including the amino acid sequences 1423, 1424, and 1425 and a light chain with three CDRs including the amino acid sequences1426, 1427, and 1428 respectively; a heavy chain with three CDRs including the amino acid sequences 1429, 1430, and 1431 and a light chain with three CDRs including the amino acid sequences1432, 1433, and 1434 respectively; a heavy chain with three CDRs including the amino acid sequences 1435, 1436, and 1437 and a light chain with three CDRs including the amino acid sequences1438, 1439, and 1440 respectively; a heavy chain with three CDRs including the amino acid sequences 1441, 1442, and 1443 and a light chain with three CDRs including the amino acid sequences1444, 1445, and 1446 respectively; a heavy chain with three CDRs including the amino acid sequences 1447, 1448, and 1449 and a light chain with three CDRs including the amino acid sequences1450, 1451, and 1452 respectively; a heavy chain with three CDRs including the amino acid sequences 1453, 1454, and 1455 and a light chain with three CDRs including the amino acid sequences1456, 1457, and 1458 respectively; a heavy chain with three CDRs including the amino acid sequences 1459, 1460, and 1461 and a light chain with three CDRs including the amino acid sequences1462, 1463, and 1464 respectively; or a heavy chain with three CDRs including the amino acid sequences 1465, 1466, and 1467 and a light chain with three CDRs including the amino acid sequences1468, 1469, and 1470 respectively.

[0076] Flavivirus (73)

[0077] Exemplary anti-West Nile virus envelope protein E (WINE) antibody include antibodies having a VH nucleotide sequence having a VH amino acid sequence having SEQ ID NO: 1224 and a VL amino acid sequence having SEQ ID NO: 1226.

[0078] Exemplary anti-West Nile virus envelope protein E (WINE) antibody include antibodies having a VH nucleotide sequence having SEQ ID NO: 1225 and a VL nucleotide sequence having SEQ ID NO: 1227.

[0079] In other embodiments the anti-West Nile virus envelope protein E (WNE) antibody has a heavy chain with three CDRs including the amino acid sequences 1244, 1245, and 1246 and a light chain with three CDRs including the amino acid sequences 1247, 1248, and 1249 respectively.

[0080] CCR4 (65)

[0081] Exemplary anti-CC-chemokine receptor 4 (CCR4) antibody include antibodies having a _{VH} nucleotide sequence having SEQ ID NO: 1329 and a _{VL} nucleotide sequence having SEQ ID NO: 1331; a _{VH} nucleotide sequence having SEQ ID NO: 1333 and a V_{L} nucleotide sequence having SEQ ID NO:1335; a _{VH} nucleotide sequence having SEQ ID NO: 1337 and a V_{L} nucleotide sequence having SEQ ID NO: 1192; a _{VH} nucleotide sequence having SEQ ID NO: 1341 and a V_{L} nucleotide sequence having SEQ ID NO: 1343; or a _{VH} nucleotide sequence having SEQ ID NO: 1357 and a V_{L} nucleotide sequence having SEQ ID NO:1359.

[0082] Exemplary anti-CC-chemokine receptor 4 (CCR4) antibody include antibodies having a V_{H} amino acid sequence having SEQ ID NO: 1330 and a V_{L} amino acid sequence having SEQ ID NO: 1332; a V_{H} amino acid sequence having SEQ ID NO: 1334 and a V_{L} amino acid sequence having SEQ ID NO: 1336; a V_{H} amino acid sequence having SEQ ID NO: 1338 and a V_{L} amino acid sequence having SEQ ID NO: 1340; a V_{H} amino acid sequence having SEQ ID NO: 1342 and a V_{L} amino acid sequence having SEQ ID NO: 1344; or a V_{H} amino acid sequence having SEQ ID NO: 1358 and a V_{L} amino acid sequence having SEQ ID NO: 1360.

[0083] In other embodiments the anti-CC-chemokine receptor 4 (CCR4) antibody has a heavy chain with three CDRs including the amino acid sequences 1203, 1208, and 1211 and a light chain with three CDRs including the amino acid sequences 1207, 1209, and 1216 respectively; or a heavy chain with three CDRs including the amino acid sequences 1204, 1208, and 1212 and a light chain with three CDRs including the amino acid sequences 1207, 1209, and 1217 respectively; or a heavy chain with three CDRs including the amino acid sequences 1204, 1208, and 1213 and a light chain with three CDRs including the amino acid sequences 1207, 1209, and 1217 respectively; or a heavy chain with three CDRs including the amino acid sequences 1205, 1208, and 1214 and a light chain with three CDRs including the amino acid sequences 1207, 1209, and 1218 respectively; or a heavy chain with three CDRs including the amino acid sequences 1206, 1208, and 1210 and a light chain with three CDRs including the amino acid sequences 1207, 1209, and 1220 respectively; or a heavy chain with three CDRs including the amino acid sequences 1202, 1208, and 1210 and a light chain with three CDRs including the amino acid sequences 1207, 1209, and 1219 respectively.

[0084] Human Immunoglobulin Heavy Chain Variable Region Germline Gene VH1-69 (57)

[0085] Exemplary anti-human immunoglobulin heavy chain variable region germline gene VH1-69 antibody include antibodies having a VH nucleotide sequence having SEQ ID NO: 1153 and a VL nucleotide sequence having SEQ ID NO: 1155; or a VH nucleotide sequence having SEQ ID NO: 1163 and a VL nucleotide sequence having SEQ ID NO:1155.

[0086] Exemplary anti-human immunoglobulin heavy chain variable region germline gene VH1-69 antibody include antibodies having a V_{H} amino acid sequence having SEQ ID NO: 1154 and a V_{L} amino acid sequence having SEQ ID NO: 1156; or a V_{H} amino acid sequence having SEQ ID NO: 1164 and a V_{L} amino acid sequence having SEQ ID NO: 1156.

[0087] In other embodiments the anti-human immunoglobulin heavy chain variable region germline gene VH1-69 antibody has a heavy chain with three CDRs including the amino acid sequences 1157, 1158, and 1159 and a light chain with three CDRs including the amino acid sequences 1160, 1161, and 1162 respectively.

[0088] Influenza (49)

[0089] Exemplary anti-influenza antibody include antibodies having a VH nucleotide sequence having SEQ ID NO: 981 and a VL nucleotide sequence having SEQ ID NO: 983; a VH nucleotide sequence having SEQ ID NO: 985 and a VL nucleotide sequence having SEQ ID NO: 989; a VH nucleotide sequence having SEQ ID NO: 987 and a VL nucleotide sequence having SEQ ID NO: 991; a VH nucleotide sequence having SEQ ID NO: 993 and a VL nucleotide sequence having SEQ ID NO: 997; a VH nucleotide sequence having SEQ ID NO: 995 and a VK nucleotide sequence having SEQ ID NO: 999; a VH nucleotide sequence having SEQ ID NO: 1001 and a VL nucleotide sequence having SEQ ID NO: 1005; a VH nucleotide sequence having SEQ ID NO: 1003 and a VL nucleotide sequence having SEQ ID NO: 1007; a VH nucleotide sequence having SEQ ID NO: 1009 and a VL nucleotide sequence having SEQ ID NO: 1011; a VH nucleotide sequence having SEQ ID NO: 1013 and a VL nucleotide sequence having SEQ ID NO: 1015; and a VH nucleotide sequence having SEQ ID NO: 1017 and a VK nucleotide sequence having SEQ ID NO: 1019; a VH nucleotide sequence having SEQ ID NO: 1020 and a VL nucleotide sequence having SEQ ID NO: 1022.

[0090] Exemplary anti-influenza antibody include antibodies having a VH amino acid sequence having SEQ ID NO: 982 and a VL amino acid sequence having SEQ ID NO: 984; a VH amino acid sequence having SEQ ID NO: 986 and a VL amino acid sequence having SEQ ID NO: 988; a VH amino acid sequence having SEQ ID NO: 986 and a VL amino acid sequence having SEQ ID NO: 990; a VH amino acid sequence having SEQ ID NO: 992 and a VL amino acid sequence having SEQ ID NO: 994; a VH amino acid sequence having SEQ ID NO: 992 and a VK amino acid sequence having SEQ ID NO: 996; a VH amino acid sequence having SEQ ID NO: 998 and a VL amino acid sequence having SEQ ID NO: 1000; a VH amino acid sequence having SEQ ID NO: 998 and a VL amino acid sequence having SEQ ID NO: 1002; a VH amino acid sequence having SEQ ID NO: 1004 and a VL amino acid sequence having SEQ ID NO: 1006; a VH amino acid sequence having SEQ ID NO: 1008 and a VL amino acid sequence having SEQ ID NO: 1010; a VH amino acid sequence having SEQ ID NO: 1012 and a VK amino acid sequence having SEQ ID NO: 1014; and a VH amino acid sequence having SEQ ID NO: 1016 and a VL amino acid sequence having SEQ ID NO: 1018.

[0091] In other embodiments the anti-influenza antibody has a heavy chain with three CDRs including the amino acid sequences of 1023, 1031, and 1039 and a light chain with three CDRs including the amino acid sequences 1047, 1059, and 1071; a heavy chain with three CDRs including the amino acid sequences of 1023, 1032, and 1040 and a light chain with three CDRs including the amino acid sequences 1048, 1060, and 1072; a heavy chain with three CDRs including the amino acid sequences of 1025, 1032, and 1040 and a light chain with three CDRs including the amino acid sequences 1057, 1069, and 1081; a heavy chain with three CDRs including the amino acid sequences of 1026, 1033, and 1041 and a light chain with three CDRs including the amino acid sequences 1049, 1061, and 1073; a heavy chain with three CDRs including the amino acid sequences of 1026, 1033, and 1041 and a light chain with three CDRs including the amino acid sequences 1054, 1066, and 1078; a heavy chain with three CDRs including the amino acid sequences of 1027, 1034, and 1042 and a light chain with three CDRs including the amino acid sequences 1050, 1062, and 1074; a heavy chain with three CDRs including the amino acid sequences of 1027, 1034, and 1042 and a light chain with three CDRs including the amino acid sequences 1056, 1068, and 1080; a heavy chain with three CDRs including the amino acid sequences of 1028, 1035, and 1043 and a light chain with three CDRs including the amino acid sequences 1051, 1063, and 1065; a heavy chain with three CDRs including the amino acid sequences of 1028, 1036, and 1044 and a light chain with three CDRs including the amino acid sequences 1052, 1064, and 1076; a heavy chain with three CDRs including the amino acid sequences of 1029, 1037, and 1045 and a light chain with three CDRs including the amino acid sequences 1053, 1065, and 1077; or a heavy chain with three CDRs including the amino acid sequences of 1030, 1038, and 1046 and a light chain with three CDRs including the amino acid sequences 1058, 1070, and 1082.

[0092] Influenza (78)

[0093] Exemplary anti-influenza antibodies include antibodies having containing a _{VH} nucleotide sequence having SEQ ID NO: 397 and a nucleotide sequence having SEQ ID NO: 398; a _{VH} nucleotide sequence having SEQ ID NO: 399 and a V_{L} nucleotide sequence having SEQ ID NO:400; a _{VH} nucleotide sequence having SEQ ID NO: 401 and a V_{L} nucleotide sequence having SEQ ID NO: 402; a _{VH} nucleotide sequence having SEQ ID NO: 403 and a _{VL} nucleotide sequence having SEQ ID NO: 404; or a _{VH} nucleotide sequence having SEQ ID NO: 405 and a _{VL} nucleotide sequence having SEQ ID NO:406; or a _{VH} nucleotide sequence having SEQ ID NO: 407 and a _{VL} nucleotide sequence having SEQ ID NO:408; or a _{VH} nucleotide sequence having SEQ ID NO: 409 and a _{VL} nucleotide sequence having SEQ ID NO:410; or a _{VH} nucleotide sequence having SEQ ID NO: 411 and a _{VH} nucleotide sequence having SEQ ID NO:412; or a _{VH} nucleotide sequence having SEQ ID NO: 413 and a _{VL} nucleotide sequence having SEQ ID NO:414; or a _{VH} nucleotide sequence having SEQ ID NO: 415 and a _{VL} nucleotide sequence having SEQ ID NO:416; or a _{VH} nucleotide sequence having SEQ ID NO: 417 and a _{VL} nucleotide sequence having SEQ ID NO:418; or a _{VH} nucleotide sequence having SEQ ID NO: 419 and a _{VL} nucleotide sequence having SEQ ID NO:420; or a _{VH} nucleotide sequence having SEQ ID NO: 421 and a _{VL} nucleotide sequence having SEQ ID NO:422; or a _{VH} nucleotide sequence having SEQ ID NO: 423 and a _{VL} nucleotide sequence having SEQ ID NO:424; or a _{VH} nucleotide sequence having SEQ ID NO: 425 and a _{VL} nucleotide sequence having SEQ ID NO:426; or a _{VH} nucleotide sequence having SEQ ID NO: 427 and a _{VL} nucleotide sequence having SEQ ID NO:428; or a _{VH} nucleotide sequence having SEQ ID NO: 429 and a _{VL} nucleotide sequence having SEQ ID NO:430; or a _{VH} nucleotide sequence having SEQ ID NO: 431 and a _{VL} nucleotide sequence having SEQ ID NO:432; or a _{VH} nucleotide sequence having SEQ ID NO: 433 and a _{VL} nucleotide sequence having SEQ ID NO:434; or a _{VH} nucleotide sequence having SEQ ID NO: 435 and a _{VL} nucleotide sequence having SEQ ID NO:436; or a _{VH} nucleotide sequence having SEQ ID NO: 437 and a _{VL} nucleotide sequence having SEQ ID NO:438; or a _{VH} nucleotide sequence having SEQ ID NO: 439 and a _{VL} nucleotide sequence having SEQ ID NO:440; or a _{VH} nucleotide sequence having SEQ ID NO: 441 and a _{VL} nucleotide sequence having SEQ ID NO:442; ; or a VH nucleotide sequence having SEQ ID NO: 541 and a VL nucleotide sequence having SEQ ID NO: 542; or a VH nucleotide sequence having SEQ ID NO: 543 and a VL nucleotide sequence having SEQ ID NO: 544; or a VH nucleotide sequence having SEQ ID NO: 545 and a VL nucleotide sequence having SEQ ID NO: 546; or a VH nucleotide sequence having SEQ ID NO: 547 and a VL nucleotide sequence having SEQ ID NO: 548; or a VH nucleotide sequence having SEQ ID NO: 549 and a VL nucleotide sequence having SEQ ID NO: 550; or a VH nucleotide sequence having SEQ ID NO: 551 and a VL nucleotide sequence having SEQ ID NO: 552; or a VH nucleotide sequence having SEQ ID NO: 553 and a VL nucleotide sequence having SEQ ID NO: 554; or a VH nucleotide sequence having SEQ ID NO: 555 and a VL nucleotide sequence having SEQ ID NO: 556; or a VH nucleotide sequence having SEQ ID NO: 557 and a VL nucleotide sequence having SEQ ID NO: 558; or a VH nucleotide sequence having SEQ ID NO: 559 and a VL nucleotide sequence having SEQ ID NO: 560; or a VH nucleotide sequence having SEQ ID NO: 561 and a VL nucleotide sequence having SEQ ID NO: 562; or a VH nucleotide sequence having SEQ ID NO: 563 and a VL nucleotide sequence having SEQ ID NO: 564; or a VH nucleotide sequence having SEQ ID NO: 565 and a VL nucleotide sequence having SEQ ID NO: 566; or a VH nucleotide sequence having SEQ ID NO: 567 and a VL nucleotide sequence having SEQ ID NO: 568; or a VH nucleotide sequence having SEQ ID NO: 569 and a VL nucleotide sequence having SEQ ID NO: 570; or a VH nucleotide sequence having SEQ ID NO: 571 and a VL nucleotide sequence having SEQ ID NO: 572; or a VH nucleotide sequence having SEQ ID NO: 573 and a VL nucleotide sequence having SEQ ID NO: 574; or a VH nucleotide sequence having SEQ ID NO: 575 and a VL nucleotide sequence having SEQ ID NO: 576; or a VH nucleotide sequence having SEQ ID NO: 577 and a VL nucleotide sequence having SEQ ID NO: 578; or a VH nucleotide sequence having SEQ ID NO: 579 and a VL nucleotide sequence having SEQ ID NO: 580; or a VH nucleotide sequence having SEQ ID NO: 581 and a VL nucleotide sequence having SEQ ID NO: 582; or a VH nucleotide sequence having SEQ ID NO: 583 and a VL nucleotide sequence having SEQ ID NO: 584; or a VH nucleotide sequence having SEQ ID NO: 585 and a VL nucleotide sequence having SEQ ID NO: 586; or a VH nucleotide sequence having SEQ ID NO: 587 and a VL nucleotide sequence having SEQ ID NO: 588; or a VH nucleotide sequence having SEQ ID NO: 589 and a VL nucleotide sequence having SEQ ID NO: 590; or a VH nucleotide sequence having SEQ ID NO: 591 and a VL nucleotide sequence having SEQ ID NO: 592; or a VH nucleotide sequence having SEQ ID NO: 593 and a VL nucleotide sequence having SEQ ID NO: 594; or a VH nucleotide sequence having SEQ ID NO: 595 and a VL nucleotide sequence having SEQ ID NO: 596; or a VH nucleotide sequence having SEQ ID NO: 597 and a VL nucleotide sequence having SEQ ID NO: 598; or a VH nucleotide sequence having SEQ ID NO: 599 and a VL nucleotide sequence having SEQ ID NO: 600.

[0094] Exemplary anti-influenza antibodies antibody include antibodies having containing a _{VH} amino acid sequence having SEQ ID NO: 469 and a _{VL} amino acid sequence having SEQ ID NO: 470; a _{VH} amino acid having SEQ ID NO: 471 and a V_{L} polypeptide sequence having SEQ ID NO:472; a _{VH} amino acid sequence having SEQ ID NO: 473 and a V_{L} amino acid sequence having SEQ ID NO: 474; a _{VH} amino acid sequence having SEQ ID NO: 475 and a _{VL} amino acid sequence having SEQ ID NO: 476; or a _{VH} nucleotide sequence having SEQ ID NO: 477 and a _{VL} nucleotide sequence having SEQ ID NO:478; a _{VH} amino acid sequence having SEQ ID NO: 479 and a _{VL} amino acid sequence having SEQ ID NO: 480; a _{VH} amino acid sequence having SEQ ID NO: 481 and a _{VL} amino acid sequence having SEQ ID NO: 482; a _{VH} amino acid sequence having SEQ ID NO: 483 and a _{VL} amino acid sequence having SEQ ID NO: 484; a _{VH} amino acid sequence having SEQ ID NO: 485 and a _{VL} amino acid sequence having SEQ ID NO: 486; a _{VH} amino acid sequence having SEQ ID NO: 487 and a _{VL} amino acid sequence having SEQ ID NO: 488; a _{VH} amino acid sequence having SEQ ID NO: 489 and a _{VL} amino acid sequence having SEQ ID NO: 490; a _{VH} amino acid sequence having SEQ ID NO: 491 and a _{VL} amino acid sequence having SEQ ID NO: 492; a _{VH} amino acid sequence having SEQ ID NO: 493 and a _{VL} amino acid sequence having SEQ ID NO: 494; a _{VH} amino acid sequence having SEQ ID NO: 495 and a _{VL} amino acid sequence having SEQ ID NO: 496; a _{VH} amino acid sequence having SEQ ID NO: 497 and a _{VL} amino acid sequence having SEQ ID NO: 498; a _{VH} amino acid sequence having SEQ ID NO: 499 and a _{VL} amino acid sequence having SEQ ID NO: 500; a _{VH} amino acid sequence having SEQ ID NO: 501 and a amino acid sequence having SEQ ID NO: 502; a _{VH} amino acid sequence having SEQ ID NO: 503 and a _{VL} amino acid sequence having SEQ ID NO: 504; a _{VH} amino acid sequence having SEQ ID NO: 505 and a _{VL} amino acid sequence having SEQ ID NO: 506; a _{VH} amino acid sequence having SEQ ID NO: 507 and a _{VL} amino acid sequence having SEQ ID NO: 508; a _{VH} amino acid sequence having SEQ ID NO: 509 and a amino acid sequence having SEQ ID NO: 510; a _{VH} amino acid sequence having SEQ ID NO: 511 and a _{VL} amino acid sequence having SEQ ID NO: 512; a _{VH} amino acid sequence having SEQ ID NO: 513 and a _{VL} amino acid sequence having SEQ ID NO: 514; a _{VH} amino acid sequence having SEQ ID NO: 515 and a _{VL} amino acid sequence having SEQ ID NO: 516; a _{VH} amino acid sequence having SEQ ID NO: 517 and a _{VL} amino acid sequence having SEQ ID NO: 518; a _{VH} amino acid sequence having SEQ ID NO: 519 and a _{VL} amino acid sequence having SEQ ID NO: 520; a _{VH} amino acid sequence having SEQ ID NO: 521 and a amino acid sequence having SEQ ID NO: 522; a _{VH} amino acid sequence having SEQ ID NO: 523 and a _{VL} amino acid sequence having SEQ ID NO: 524; a _{VH} amino acid sequence having SEQ ID NO: 525 and a _{VL} amino acid sequence having SEQ ID NO: 526; a _{VH} amino acid sequence having SEQ ID NO: 527 and a _{VL} amino acid sequence having SEQ ID NO: 528; a _{VH} amino acid sequence having SEQ ID NO: 529 and a amino acid sequence having SEQ ID NO: 530; a _{VH} amino acid sequence having SEQ ID NO: 531 and a _{VL} amino acid sequence having SEQ ID NO: 532; a _{VH} amino acid sequence having SEQ ID NO: 533 and a _{VL} amino acid sequence having SEQ ID NO: 534; a _{VH} amino acid sequence having SEQ ID NO: 535 and a _{VL} amino acid sequence having SEQ ID NO: 536; a _{VH} amino acid sequence having SEQ ID NO: 537 and a _{VL} amino acid sequence having SEQ ID NO: 538; a _{VH} amino acid sequence having SEQ ID NO: 539 and a amino acid sequence having SEQ ID NO: 540 a VH amino acid sequence having SEQ ID NO: 601 and a VL amino acid sequence having SEQ ID NO: 602 a VH amino acid sequence having SEQ ID NO: 603 and a VL amino acid sequence having SEQ ID NO: 604 a VH amino acid sequence having SEQ ID NO: 605 and a VL amino acid sequence having SEQ ID NO: 606 a VH amino acid sequence having SEQ ID NO: 607 and a VL amino acid sequence having SEQ ID NO: 608 a VH amino acid sequence having SEQ ID NO: 609 and a VL amino acid sequence having SEQ ID NO: 610 a VH amino acid sequence having SEQ ID NO: 611 and a VL amino acid sequence having SEQ ID NO: 612 a VH amino acid sequence having SEQ ID NO: 613 and a VL amino acid sequence having SEQ ID NO: 614 a VH amino acid sequence having SEQ ID NO: 615 and a VL amino acid sequence having SEQ ID NO: 616 a VH amino acid sequence having SEQ ID NO: 617 and a VL amino acid sequence having SEQ ID NO: 618 a VH amino acid sequence having SEQ ID NO: 619 and a VL amino acid sequence having SEQ ID NO: 620 a VH amino acid sequence having SEQ ID NO: 621 and a VL amino acid sequence having SEQ ID NO: 622 a VH amino acid sequence having SEQ ID NO: 623 and a VL amino acid sequence having SEQ ID NO: 624 a VH amino acid sequence having SEQ ID NO: 625 and a VL amino acid sequence having SEQ ID NO: 626 a VH amino acid sequence having SEQ ID NO: 627 and a VL amino acid sequence having SEQ ID NO: 628 a VH amino acid sequence having SEQ ID NO: 629 and a VL amino acid sequence having SEQ ID NO: 630 a VH amino acid sequence having SEQ ID NO: 631 and a VL amino acid sequence having SEQ ID NO: 632 a VH amino acid sequence having SEQ ID NO: 633 and a VL amino acid sequence having SEQ ID NO: 634 a VH amino acid sequence having SEQ ID NO: 635 and a VL amino acid sequence having SEQ ID NO: 636 a VH amino acid sequence having SEQ ID NO: 637 and a VL amino acid sequence having SEQ ID NO: 638 a VH amino acid sequence having SEQ ID NO: 639 and a VL amino acid sequence having SEQ ID NO: 640 a VH amino acid sequence having SEQ ID NO: 641 and a VL amino acid sequence having SEQ ID NO: 642 a VH amino acid sequence having SEQ ID NO: 643 and a VL amino acid sequence having SEQ ID NO: 644 a VH amino acid sequence having SEQ ID NO: 645 and a VL amino acid sequence having SEQ ID NO: 646 a VH amino acid sequence having SEQ ID NO: 647 and a VL amino acid sequence having SEQ ID NO: 648 a VH amino acid sequence having SEQ ID NO: 649 and a VL amino acid sequence having SEQ ID NO: 650 a VH amino acid sequence having SEQ ID NO: 651 and a VL amino acid sequence having SEQ ID NO: 652 a VH amino acid sequence having SEQ ID NO: 653 and a VL amino acid sequence having SEQ ID NO: 654 a VH amino acid sequence having SEQ ID NO: 655 and a VL amino acid sequence having SEQ ID NO: 656 a VH amino acid sequence having SEQ ID NO: 657 and a VL amino acid sequence having SEQ ID NO: 658 a VH amino acid sequence having SEQ ID NO: 659 and a VL amino acid sequence having SEQ ID NO: 660.

[0095] In other embodiments the anti-influenza antibodies antibody has a heavy chain with three CDRs including the amino acid sequences SEQ ID NO: 1, 37, 73 respectively and a light chain with three CDRs including the amino acid sequences 109, 145, 181 respectively; or a heavy chain with three CDRs comprising the amino acid sequences 2, 38, 74 respectively and a light chain with three CDRs comprising the amino acid sequences 110, 146, 182, respectively; or a heavy chain with three CDRs comprising the amino acid sequences 3, 39, 75 respectively and a light chain with three CDRs comprising the amino acid sequences 111, 147, 183, respectively; or a heavy chain with three CDRs comprising the amino acid sequences 4, 40, 76 respectively and a light chain with three CDRs comprising the amino acid sequences 112, 148, 184, respectively; or a heavy chain with three CDRs comprising the amino acid sequences 5, 41, 77 respectively and a light chain with three CDRs comprising the amino acid sequences 113, 149, 185, respectively; or a heavy chain with three CDRs comprising the amino acid sequences 6, 42, 78 respectively and a light chain with three CDRs comprising the amino acid sequences 114, 150, 186, respectively; or a heavy chain with three CDRs comprising the amino acid sequences 7, 43, 79 respectively and a light chain with three CDRs comprising the amino acid sequences 115, 151, 187, respectively; or a heavy chain with three CDRs comprising the amino acid sequences 8, 44, 80 respectively and a light chain with three CDRs comprising the amino acid sequences 116, 152, 188, respectively; or a heavy chain with three CDRs comprising the amino acid sequences 9, 45, 81 respectively and a light chain with three CDRs comprising the amino acid sequences 117, 153, 189, respectively; or a heavy chain with three CDRs comprising the amino acid sequences 10, 46, 82 respectively and a light chain with three CDRs comprising the amino acid sequences 118, 154, 190, respectively; or a heavy chain with three CDRs comprising the amino acid sequences 11, 47, 83 respectively and a light chain with three CDRs comprising the amino acid sequences 119, 155, 191, respectively; or a heavy chain with three CDRs comprising the amino acid sequences 12, 48, 84 respectively and a light chain with three CDRs comprising the amino acid sequences 120, 156, 192, respectively; or a heavy chain with three CDRs comprising the amino acid sequences 13, 49, 85 respectively and a light chain with three CDRs comprising the amino acid sequences 121, 157, 193, respectively; or a heavy chain with three CDRs comprising the amino acid sequences 14, 50, 86 respectively and a light chain with three CDRs comprising the amino acid sequences 122, 158, 194, respectively; or a heavy chain with three CDRs comprising the amino acid sequences 15, 51, 87 respectively and a light chain with three CDRs comprising the amino acid sequences 123, 159, 195, respectively; or a heavy chain with three CDRs comprising the amino acid sequences 16, 52, 88 respectively and a light chain with three CDRs comprising the amino acid sequences 124, 160, 196, respectively; or a heavy chain with three CDRs comprising the amino acid sequences 17, 53, 89 respectively and a light chain with three CDRs comprising the amino acid sequences 125, 161, 197, respectively; or a heavy chain with three CDRs comprising the amino acid sequences 18, 54, 90 respectively and a light chain with three CDRs comprising the amino acid sequences 126, 162, 198, respectively; or a heavy chain with three CDRs comprising the amino acid sequences 19, 55, 91 respectively and a light chain with three CDRs comprising the amino acid sequences 127, 163, 199, respectively; or a heavy chain with three CDRs comprising the amino acid sequences 20, 56, 92 respectively and a light chain with three CDRs comprising the amino acid sequences 128, 164, 200, respectively; or a heavy chain with three CDRs comprising the amino acid sequences 21, 57, 93 respectively and a light chain with three CDRs comprising the amino acid sequences 129, 165, 201, respectively; or a heavy chain with three CDRs comprising the amino acid sequences 22, 58, 94 respectively and a light chain with three CDRs comprising the amino acid sequences 130, 166, 202, respectively; or a heavy chain with three CDRs comprising the amino acid sequences 23, 59, 95 respectively and a light chain with three CDRs comprising the amino acid sequences 131, 167, 203, respectively; or a heavy chain with three CDRs comprising the amino acid sequences 24, 60, 96 respectively and a light chain with three CDRs comprising the amino acid sequences 132, 168, 204, respectively; or a heavy chain with three CDRs comprising the amino acid sequences 25, 61, 95 respectively and a light chain with three CDRs comprising the amino acid sequences 133, 169, 205, respectively; or a heavy chain with three CDRs comprising the amino acid sequences 26, 62, 96 respectively and a light chain with three CDRs comprising the amino acid sequences 134, 170, 206, respectively; or a heavy chain with three CDRs comprising the amino acid sequences 27, 63, 97 respectively and a light chain with three CDRs comprising the amino acid sequences 135, 171, 207, respectively; or a heavy chain with three CDRs comprising the amino acid sequences 28, 64, 98 respectively and a light chain with three CDRs comprising the amino acid sequences 136, 172, 208, respectively; or a heavy chain with three CDRs comprising the amino acid sequences 29, 65, 99 respectively and a light chain with three CDRs comprising the amino acid sequences 137, 173, 209, respectively; or a heavy chain with three CDRs comprising the amino acid sequences 30, 66, 100 respectively and a light chain with three CDRs comprising the amino acid sequences 138, 174, 210, respectively; or a heavy chain with three CDRs comprising the amino acid sequences 31, 67, 101 respectively and a light chain with three CDRs comprising the amino acid sequences 139, 175, 211, respectively; or a heavy chain with three CDRs comprising the amino acid sequences 32, 68, 102 respectively and a light chain with three CDRs comprising the amino acid sequences 140, 176, 212, respectively; or a heavy chain with three CDRs comprising the amino acid sequences 33, 69, 103 respectively and a light chain with three CDRs comprising the amino acid sequences 141, 177, 213, respectively; or a heavy chain with three CDRs comprising the amino acid sequences 34, 70, 104 respectively and a light chain with three CDRs comprising the amino acid sequences 142, 178, 214, respectively; or a heavy chain with three CDRs comprising the amino acid sequences 35, 71, 105 respectively and a light chain with three CDRs comprising the amino acid sequences 143, 179, 215, respectively; or a heavy chain with three CDRs comprising the amino acid sequences 36, 72, 106 respectively and a light chain with three CDRs comprising the amino acid sequences 144, 180, 216, respectively; or a heavy chain with three CDRs comprising the amino acid sequences 217, 247, 277 respectively and a light chain with three CDRs comprising the amino acid sequences 307, 337, 367, respectively; or a heavy chain with three CDRs comprising the amino acid sequences 218, 248, 278 respectively and a light chain with three CDRs comprising the amino acid sequences 308, 338, 368, respectively; or a heavy chain with three CDRs comprising the amino acid sequences 219, 249, 279 respectively and a light chain with three CDRs comprising the amino acid sequences 309, 339, 369, respectively; or a heavy chain with three CDRs comprising the amino acid sequences 220, 250, 280 respectively and a light chain with three CDRs comprising the amino acid sequences 310, 340, 370, respectively; or a heavy chain with three CDRs comprising the amino acid sequences 221, 251, 281 respectively and a light chain with three CDRs comprising the amino acid sequences 311, 341, 371, respectively; or a heavy chain with three CDRs comprising the amino acid sequences 222, 252, 282 respectively and a light chain with three CDRs comprising the amino acid sequences 312, 342, 372, respectively; or a heavy chain with three CDRs comprising the amino acid sequences 223, 253, 283 respectively and a light chain with three CDRs comprising the amino acid sequences 313, 343, 373, respectively; or a heavy chain with three CDRs comprising the amino acid sequences 224, 254, 284 respectively and a light chain with three CDRs comprising the amino acid sequences 314, 344, 374, respectively; or a heavy chain with three CDRs comprising the amino acid sequences 225, 255, 285 respectively and a light chain with three CDRs comprising the amino acid sequences 315, 345, 375, respectively; or a heavy chain with three CDRs comprising the amino acid sequences 226, 256, 286 respectively and a light chain with three CDRs comprising the amino acid sequences 316, 346, 376, respectively; or a heavy chain with three CDRs comprising the amino acid sequences 227, 257, 287 respectively and a light chain with three CDRs comprising the amino acid sequences 317, 347, 377, respectively; or a heavy chain with three CDRs comprising the amino acid sequences 228, 258, 288 respectively and a light chain with three CDRs comprising the amino acid sequences 318, 348, 378, respectively; or a heavy chain with three CDRs comprising the amino acid sequences 229, 259, 289 respectively and a light chain with three CDRs comprising the amino acid sequences 319, 349, 379, respectively; or a heavy chain with three CDRs comprising the amino acid sequences 230, 260, 290 respectively and a light chain with three CDRs comprising the amino acid sequences 320, 350, 380, respectively; or a heavy chain with three CDRs comprising the amino acid sequences 231, 261, 291 respectively and a light chain with three CDRs comprising the amino acid sequences 321, 351, 381, respectively; or a heavy chain with three CDRs comprising the amino acid sequences 232, 262, 292 respectively and a light chain with three CDRs comprising the amino acid sequences 322, 352, 382, respectively; or a heavy chain with three CDRs comprising the amino acid sequences 233, 263, 293 respectively and a light chain with three CDRs comprising the amino acid sequences 323, 353, 383, respectively; or a heavy chain with three CDRs comprising the amino acid sequences 234, 273, 294 respectively and a light chain with three CDRs comprising the amino acid sequences 324, 354, 384, respectively; or a heavy chain with three CDRs comprising the amino acid sequences 235, 274, 295 respectively and a light chain with three CDRs comprising the amino acid sequences 325, 355, 385, respectively; or a heavy chain with three CDRs comprising the amino acid sequences 236, 275, 296 respectively and a light chain with three CDRs comprising the amino acid sequences 326, 356, 386, respectively; or a heavy chain with three CDRs comprising the amino acid sequences 237, 276, 297 respectively and a light chain with three CDRs comprising the amino acid sequences 327, 357, 387, respectively; or a heavy chain with three CDRs comprising the amino acid sequences 237, 277, 298 respectively and a light chain with three CDRs comprising the amino acid sequences 328, 358, 388, respectively; or a heavy chain with three CDRs comprising the amino acid sequences 238, 278, 299 respectively and a light chain with three CDRs comprising the amino acid sequences 329, 359, 389, respectively; or a heavy chain with three CDRs comprising the amino acid sequences 239, 279, 300 respectively and a light chain with three CDRs comprising the amino acid sequences 330, 360, 390, respectively; or a heavy chain with three CDRs comprising the amino acid sequences 240, 280, 301 respectively and a light chain with three CDRs comprising the amino acid sequences 331, 361, 391, respectively; or a heavy chain with three CDRs comprising the amino acid sequences 241, 281, 302 respectively and a light chain with three CDRs comprising the amino acid sequences 332, 362, 392, respectively; or a heavy chain with three CDRs comprising the amino acid sequences 242, 282, 303 respectively and a light chain with three CDRs comprising the amino acid sequences 333, 363, 393, respectively; or a heavy chain with three CDRs comprising the amino acid sequences 243, 283, 304 respectively and a light chain with three CDRs comprising the amino acid sequences 334, 364, 394, respectively; or a heavy chain with three CDRs comprising the amino acid sequences 244, 284, 305 respectively and a light chain with three CDRs comprising the amino acid sequences 335, 365, 395, respectively; or a heavy chain with three CDRs comprising the amino acid sequences 245, 285, 306 respectively and a light chain with three CDRs comprising the amino acid sequences 336, 366, 396, respectively.

[0096] Other anti-influenza antibodies include those having the amino acid or nucleic acid sequences shown in the below Table 1.

TABLE 1A
Antibody 3I14 Variable Region nucleic acid
sequences

V_{H} chain of 3I14 (SEQ ID NO: 1665)
CAGGTGCAGCTGTTGGAGTCTGGGGGAGGCGTGGTCCAGCCTGGGAGGTC
CCTGAGACTCTCCTGTGCAGCCTCTGGATTCACCTTCAGTAACTATGGCA
TGCACTGGGTCCGCCAGGCTCCAGGCAAGGGGCTGGAGTGGGTGGCAATT
ATATCATTTGATGGAAGTAAAAAATATTATGCAAACTCCGTGAAGGGCCG
ATCCACCATCTCCAGAGACAATTCCAAGAACACGCTGTCTCTGCAAATGA
ACAGCCTGGGACCTGAGGACACGGCTCTATATTACTGTGCGAAACTGCCC
TCCCCGTATTACTTTGATAGTCGGTTCGTGTGGGTCGCCGCCAGCGCATT
TCACTTCTGGGGCCAGGGAATCCTGGTCACCGTCTCTTCA
V_{L} chain of 3I14 (SEQ ID NO: 1667)
AATTTTATGCTGACTCAGCCACCCTCAGCGTCTGGGACCCCCGGGCAGAG
GGTCACCATCTCTTGCTCTGGAAGCAGCTCCAACATCGGAGGTAATACTG
TACACTGGTTCCAGCAGCTCCCAGGAACGGCCCCCAAACTCCTCATCTAT
ACTAATAGTCTGCGGCCCTCAGGGGTCCCTGACCGATTCTCTGGCTCCAA
GTCTGGCACCTCAGCCTCCCTGGCCATCAGTGGGCTCCAGTCTGAGGATG
AGGCTGATTATTACTGTGCAGCATGGGATGACAGCCTAAATGGTCAGGTG
TTCGGCGGAGGGACCAAGCTGACCGTCCTA

TABLE 1B
Antibody 3I14 Variable Region amino acid
sequences

V_{H} chain of 3I14 (SEQ ID NO: 1666)
QVQLLESGGGVVQPGRSLRLSCAASGFTFSNYGMHWVRQAPGKGLEWVAI
ISFDGSKKYYANSVKGRSTISRDNSKNTLSLQMNSLGPEDTALYYCAKLP
SPYYFDSRFVWVAASAFHFWGQGILVTVSS
V_{L} chain of 3I14 (SEQ ID NO: 1668)
NFMLTQPPSASGTPGQRVTISCSGSSSNIGGNTVHWFQQLPGTAPKLLIY
TNSLRPSGVPDRFSGSKSGTSASLAISGLQSEDEADYYCAAWDDSLNGQV
FGGGTKLTVL

TABLE 1C
Antibody 3I14V_{L}D94N Variable Region nucleic acid
sequence

V_{L} chain of 3I14V_{L}D94N (SEQ ID NO: 1669)
AATTTTATGCTGACTCAGCCACCCTCAGCGTCTGGGACCCCCGGGCAGAGG
GTCACCATCTCTTGCTCTGGAAGCAGCTCCAACATCGGAGGTAATACTGTA
CACTGGTTCCAGCAGCTCCCAGGAACGGCCCCCAAACTCCTCATCTATACT
AATAGTCTGCGGCCCTCAGGGGTCCCTGACCGATTCTCTGGCTCCAAGTCT
GGCACCTCAGCCTCCCTGGCCATCAGTGGGCTCCAGTCTGAGGATGAGGCT
GATTATTACTGTGCAGCATGGGATAACAGCCTAAATGGTCAGGTGTTCGGC
GGAGGGACCAAGCTGACCGTCCTA

TABLE 1C
Antibody 3I14V_{L}D94N Variable Region amino acid
sequence

V_{L} chain of 3I14V_{L}D94N (SEQ ID NO: 1670)
NFMLTQPPSASGTPGQRVTISCSGSSSNIGGNTVHWFQQLPGTAPKLLIYT
NSLRPSGVPDRFSGSKSGTSASLAISGLQSEDEADYYCAAWDNSLNGQVFG
GGTKLTVL

[0097] The amino acid sequences of the heavy and light chain complementary determining regions of the 3I14 and 3I14V_{L}D94N neutralizing influenza antibodies are shown in the below Table 2

TABLE 2

| | | |
|---|---|---|
| HCDR1 | GFTFSNYG | (SEQ ID NO: 1671) |
| HCDR2 | ISFDGSKK | (SEQ ID NO: 1672) |
| HCDR3 | CAKLPSPYYFDSRFVWVA | (SEQ ID NO: 1673) |
| | ASAFHFW | |
| LCDR1 | SSNIGGNT | (SEQ ID NO: 1674) |
| LCDR2 | TNS | (SEQ ID NO: 1675) |
| LCDR3 | CAAWDDSLNGQVF | (SEQ ID NO: 1676) |
| 3I14V_{L}D94N | CAAWDNSLNGQVF | (SEQ ID NO: 1677) |
| LCDR3 | | |

[0098] Other binding domain than scFv can also be used for predefined targeting of lymphocytes, such as camelid single-domain antibody fragments or receptor ligands, antibody binding domains, antibody hypervariable loops or CDRs as non limiting examples.

[0099] In a preferred embodiment said transmembrane domain further comprises a stalk region between said extracellular ligand-binding domain and said transmembrane domain. The term “stalk region” used herein generally means any oligo- or polypeptide that functions to link the transmembrane domain to the extracellular ligand-binding domain. In particular, stalk region are used to provide more flexibility and accessibility for the extracellular ligand-binding domain. A stalk region may comprise up to 300 amino acids, preferably 10 to 100 amino acids and most preferably 25 to 50 amino acids. Stalk region may be derived from all or part of naturally occurring molecules, such as from all or part of the extracellular region of CD8, CD4 or CD28, or from all or part of an antibody constant region. Alternatively the stalk region may be a synthetic sequence that corresponds to a naturally occurring stalk sequence, or may be an entirely synthetic stalk sequence. In a preferred embodiment said stalk region is a part of human CD8 alpha chain

[0100] The signal transducing domain or intracellular signaling domain of the CAR of the invention is responsible for intracellular signaling following the binding of extracellular ligand binding domain to the target resulting in the activation of the immune cell and immune response. In other words, the signal transducing domain is responsible for the activation of at least one of the normal effector functions of the immune cell in which the CAR is expressed. For example, the effector function of a T cell can be a cytolytic activity or helper activity including the secretion of cytokines. Thus, the term “signal transducing domain” refers to the portion of a protein which transduces the effector signal function signal and directs the cell to perform a specialized function.

[0101] Signal transduction domain comprises two distinct classes of cytoplasmic signaling sequence, those that initiate antigen-dependent primary activation, and those that act in an antigen-independent manner to provide a secondary or co-stimulatory signal. Primary cytoplasmic signaling sequence can comprise signaling motifs which are known as immunoreceptor tyrosine-based activation motifs of ITAMs. ITAMs are well defined signaling motifs found in the intracytoplasmic tail of a variety of receptors that serve as binding sites for syk/zap70 class tyrosine kinases. Examples of ITAM used in the invention can include as non limiting examples those derived from TCR zeta, FcR gamma, FcR beta, FcR epsilon, CD3 gamma, CD3 delta, CD3 epsilon, CD5, CD22, CD79a, CD79b and CD66d. In a preferred embodiment, the signaling transducing domain of the CAR can comprise the CD3 zeta signaling domain, or the intracytoplasmic domain of the Fc epsilon RI beta or gamma chains. In another preferred embodiment, the signaling is provided by CD3 zeta together with co-stimulation provided by CD28 and a tumor necrosis factor receptor (TNFr), such as 4-1BB or OX40), for example.

[0102] In particular embodiment the intracellular signaling domain of the CAR of the present invention comprises a co-stimulatory signal molecule. In some embodiments the intracellular signaling domain contains 2, 3, 4 or more co-stimulatory molecules in tandem. A co-stimulatory molecule is a cell surface molecule other than an antigen receptor or their ligands that is required for an efficient immune response.

[0103] “Co-stimulatory ligand” refers to a molecule on an antigen presenting cell that specifically binds a cognate co-stimulatory molecule on a T-cell, thereby providing a signal which, in addition to the primary signal provided by, for instance, binding of a TCR/CD3 complex with an MHC molecule loaded with peptide, mediates a T cell response, including, but not limited to, proliferation activation, differentiation and the like. A co-stimulatory ligand can include but is not limited to CD7, B7-1 (CD80), B7-2 (CD86), PD-L1, PD-L2, 4-1BBL, OX40L, inducible costimulatory ligand (ICOS-L), intercellular adhesion molecule (ICAM, CD30L, CD40, CD70, CD83, HLA-G, MICA, M1CB, HVEM, lymphotoxin beta receptor, 3/TR6, ILT3, ILT4, an agonist or antibody that binds Toll ligand receptor and a ligand that specifically binds with B7-H3. A co-stimulatory ligand also encompasses, inter alia, an antibody that specifically binds with a co-stimulatory molecule present on a T cell, such as but not limited to, CD27, CD28, 4-IBB, OX40, CD30, CD40, PD-1, ICOS, lymphocyte function-associated antigen-1 (LFA-1), CD2, CD7, LTGHT, NKG2C, B7-H3, a ligand that specifically binds with CD83.

[0104] A “co-stimulatory molecule” refers to the cognate binding partner on a T-cell that specifically binds with a co-stimulatory ligand, thereby mediating a co-stimulatory response by the cell, such as, but not limited to proliferation. Co-stimulatory molecules include, but are not limited to an MHC class 1 molecule, BTLA and Toll ligand receptor. Examples of costimulatory molecules include CD27, CD28, CD8, 4-1BB (CD137), OX40, CD30, CD40, PD-1, ICOS, lymphocyte function-associated antigen-1 (LFA-1), CD2, CD7, LIGHT, NKG2C, B7-H3 and a ligand that specifically binds with CD83 and the like. The In another particular embodiment, said signal transducing domain is a TNFR-associated Factor 2 (TRAF2) binding motifs, intracytoplasmic tail of costimulatory TNFR member family. Cytoplasmic tail of costimulatory TNFR family member contains TRAF2 binding motifs consisting of the major conserved motif (P/S/A)X(Q/E)E) or the minor motif (PXQXXD), wherein X is any amino acid. TRAF proteins are recruited to the intracellular tails of many TNFRs in response to receptor trimerization.

[0105] The distinguishing features of appropriate transmembrane polypeptides comprise the ability to be expressed at the surface of an immune cell, in particular lymphocyte cells or Natural killer (NK) cells, and to interact together for directing cellular response of immune cell against a predefined target cell. The different transmembrane polypeptides of the CAR of the present invention comprising an extracellular ligand-biding domain and/or a signal transducing domain interact together to take part in signal transduction following the binding with a target ligand and induce an immune response. The transmembrane domain can be derived either from a natural or from a synthetic source. The transmembrane domain can be derived from any membrane-bound or transmembrane protein.

[0106] The term “a part of” used herein refers to any subset of the molecule, that is a shorter peptide. Alternatively, amino acid sequence functional variants of the polypeptide can be prepared by mutations in the DNA which encodes the polypeptide. Such variants or functional variants include, for example, deletions from, or insertions or substitutions of, residues within the amino acid sequence. Any combination of deletion, insertion, and substitution may also be made to arrive at the final construct, provided that the final construct possesses the desired activity, especially to exhibit a specific anti-target cellular immune activity. The functionality of the CAR of the invention within a host cell is detectable in an assay suitable for demonstrating the signaling potential of said CAR upon binding of a particular target. Such assays are available to the skilled person in the art. For example, this assay allows the detection of a signaling pathway, triggered upon binding of the target, such as an assay involving measurement of the increase of calcium ion release, intracellular tyrosine phosphorylation, inositol phosphate turnover, or interleukin (IL) 2, interferon .gamma., GM-CSF, IL-3, IL-4 production thus effected.

[0107] Cells

[0108] Embodiments of the invention include cells that express a CAR (i.e, CARTS). The cell may be of any kind, including an immune cell capable of expressing the CAR for cancer therapy or a cell, such as a bacterial cell, that harbors an expression vector that encodes the CAR. As used herein, the terms “cell,” “cell line,” and “cell culture” may be used interchangeably. All of these terms also include their progeny, which is any and all subsequent generations. It is understood that all progeny may not be identical due to deliberate or inadvertent mutations. In the context of expressing a heterologous nucleic acid sequence, “host cell” refers to a eukaryotic cell that is capable of replicating a vector and/or expressing a heterologous gene encoded by a vector. A host cell can, and has been, used as a recipient for vectors. A host cell may be “transfected” or “transformed,” which refers to a process by which exogenous nucleic acid is transferred or introduced into the host cell. A transformed cell includes the primary subject cell and its progeny. As used herein, the terms “engineered” and “recombinant” cells or host cells are intended to refer to a cell into which an exogenous nucleic acid sequence, such as, for example, a vector, has been introduced. Therefore, recombinant cells are distinguishable from naturally occurring cells which do not contain a recombinantly introduced nucleic acid. In embodiments of the invention, a host cell is a T cell, including a cytotoxic T cell (also known as TC, Cytotoxic T Lymphocyte, CTL, T-Killer cell, cytolytic T cell, CD8+ T-cells or killer T cell); NK cells and NKT cells are also encompassed in the invention.

[0109] Some vectors may employ control sequences that allow it to be replicated and/or expressed in both prokaryotic and eukaryotic cells. One of skill in the art would further understand the conditions under which to incubate all of the above described host cells to maintain them and to permit replication of a vector. Also understood and known are techniques and conditions that would allow large-scale production of vectors, as well as production of the nucleic acids encoded by vectors and their cognate polypeptides, proteins, or peptides.

[0110] The cells can be autologous cells, syngeneic cells, allogenic cells and even in some cases, xenogeneic cells.

[0111] In many situations one may wish to be able to kill the modified CTLs, where one wishes to terminate the treatment, the cells become neoplastic, in research where the absence of the cells after their presence is of interest, or other event. For this purpose one can provide for the expression of certain gene products in which one can kill the modified cells under controlled conditions, such as inducible suicide genes.

[0112] Armed CARTS

[0113] The invention further includes CARTS that are modified to secrete one or more polypeptides. The polypeptide can be for example an antibody or cytokine. Preferably, the antibody is specific for CAIX, GITR, PD-L1, PD-L2. PD-1, or CCR4

[0114] Armed CARTS have the advantage of simultaneously secreting a polypeptide at the targeted site, e.g. tumor site.

[0115] Armed CART can be constructed by including a nucleic acid encoding the polypeptide of interest after the intracellular signaling domain. Preferably, there is an internal ribosome entry site, (IRES), positioned between the intracellular signaling domain and the polypeptide of interest. One skilled in the art can appreciate that more than one polypeptide can be expressed by employing multiple IRES sequences in tandem.

[0116] In one embodiment, the methods and compositions presented herein provide a target-specific Anti-CAIX CAR T cell of second generation armed with the power to secrete anti-PD-L1 IgGs in the RCC milieu to combat T cell exhaustion. The human Anti-CAIX CAR containing the CD28 co-stimulatory domain was chosen based in its killing activity and low immunogenicity in human cRCC xenografts in mice. The Anti-CAIX CART cells-secreting Anti-PD-L1 IgG1 or IgG4 was extensively compared with an unrelated Anti-BCMA CAR or with an Anti-CAIX CAR, both secreting an irrelevant Anti-SARS IgG1. We have demonstrated stable expression of the CARs and high proliferation of all CART cells. Anti-CAIX CART cells have capacity to undergo clonal expansion when in contact with CAIX+ RCC cells, and were also activated, releasing high levels of IFN□ and IL-2, which could improve tumor suppression. These Anti-CAIX CART cells are also able to secrete high levels of Anti-PD-L1 IgG1 or IgG4 and these antibodies can interact specifically with PD-L1, inducing downregulation of the exhaustion markers PD-1, Tim-3 and Lag-3 in vitro and in vivo. These results have shown that the Anti-PD-L1 antibodies secreted in the tumor microenvironment are able to revert T cell exhaustion, facilitating the Anti-CAIX CART cells antitumor activity. These Anti-CAIX CART cells, mainly the ones secreting anti-PD-L1, are also able to diminish the proliferation of CAIX+ RCC cells, resulting in a slow tumor growth and small tumor size and weight in an orthotopic NSG mice model of RCC. In addition, Anti-CAIX CART cell secreting the IgG1 isotype of Anti-PD-L1 was also able to induce ADCC in vitro and increased the number of human NK cells infiltrating the tumor site in vivo. The human NK cells were injected only in 2 mice of each group, two days before their euthanasia to determine the NK cells capacity to recognize the IgG1 isotype of the Anti-PD-L1 in vivo, which was attested. The injection of human NK cells was not made in the beginning of the treatment once our previous experience with this mice model showed that these cells last only for a few days in their blood

[0117] In one embodiment, the injection of CART cells into mice was performed without the addition of interleukins to avoid their influence in the therapeutic effect of CART cells alone.

[0118] In another embodiment, CART cells can be maintained with the use of cytokines such as, for example, IL-2, IL-4, IL-7, IL-9, IL-15 and IL-21.

[0119] Cytokines sharing the γc receptor, like IL-2, IL-4, IL-7, IL-9, IL-15 and IL-21 are important for the development and maintenance of memory T cells. Among them, IL-21 promote a less differentiated phenotype, associated with an enrichment of tumor-specific CD8 T cells, with increased anti-tumor effect in a mouse melanoma model when compared to IL-2 or IL-15.

[0120] In certain embodiments, CART cells are maintained with IL-21.

[0121] CAIX is a consistent marker for development of cancer targeted systemic therapies due to it overexpression in many tumors, remarkably in cRCC, but it is also expressed physiologically in a few tissues.

[0122] In one embodiment, the anti-CAIX scFv in the CAR recognizes the catalytic domain of CAIX, located in the central portion of the protein, which could increase its specificity to sites of higher expression of CAIX.

[0123] The choice of CD28 as a co-stimulatory domain for the CARs presented herein was based in the fact that CD28 CARs direct an active proliferative response and enhance effector functions, whereas 4-1BB-based CARs induce a more progressive T cell accumulation that may counterweigh for less immediate effectiveness. In one embodiment, the CD28 is replaced by 41BB in the CAR constructs.

[0124] T cell exhaustion is common in cancer and these T cells present low capacities of proliferation and cytokine production associated with high apoptosis rate and expression of inhibitory receptors like PD-1, Tim-3 and Lag3. New strategies for preventing T cell exhaustion include of PD-1/PD-L1 axis.

[0125] The methods and compositions presented herein provide Anti-CAIX CART cells-secreting Anti-PD-L1 IgG1 or IgG4 that can diminish T cell exhaustion, improving CART cell efficiency in the cRCC treatment in vitro and in vivo.

[0126] Introduction of Constructs into CTLs

[0127] Expression vectors that encode the CARs can be introduced as one or more DNA molecules or constructs, where there may be at least one marker that will allow for selection of host cells that contain the construct(s).

[0128] The constructs can be prepared in conventional ways, where the genes and regulatory regions may be isolated, as appropriate, ligated, cloned in an appropriate cloning host, analyzed by restriction or sequencing, or other convenient means. Particularly, using PCR, individual fragments including all or portions of a functional unit may be isolated, where one or more mutations may be introduced using “primer repair”, ligation, in vitro mutagenesis, etc., as appropriate. The construct(s) once completed and demonstrated to have the appropriate sequences may then be introduced into the CTL by any convenient means. The constructs may be integrated and packaged into non-replicating, defective viral genomes like Adenovirus, Adeno-associated virus (AAV), or Herpes simplex virus (HSV) or others, including retroviral vectors or lentiviral vectors, for infection or transduction into cells. The constructs may include viral sequences for transfection, if desired. Alternatively, the construct may be introduced by fusion, electroporation, biolistics, transfection, lipofection, or the like. The host cells may be grown and expanded in culture before introduction of the construct(s), followed by the appropriate treatment for introduction of the construct(s) and integration of the construct(s). The cells are then expanded and screened by virtue of a marker present in the construct. Various markers that may be used successfully include hprt, neomycin resistance, thymidine kinase, hygromycin resistance, etc.

[0129] In some instances, one may have a target site for homologous recombination, where it is desired that a construct be integrated at a particular locus. For example,) can knock-out an endogenous gene and replace it (at the same locus or elsewhere) with the gene encoded for by the construct using materials and methods as are known in the art for homologous recombination. For homologous recombination, one may use either .OMEGA. or O-vectors. See, for example, Thomas and Capecchi, Cell (1987) 51, 503-512; Mansour, et al., Nature (1988) 336, 348-352; and Joyner, et al., Nature (1989) 338, 153-156.

[0130] The constructs may be introduced as a single DNA molecule encoding at least the CAR and optionally another gene, or different DNA molecules having one or more genes. Other genes include genes that encode therapeutic molecules or suicide genes, for example. The constructs may be introduced simultaneously or consecutively, each with the same or different markers.

[0131] Vectors containing useful elements such as bacterial or yeast origins of replication, selectable and/or amplifiable markers, promoter/enhancer elements for expression in prokaryotes or eukaryotes, etc. that may be used to prepare stocks of construct DNAs and for carrying out transfections are well known in the art, and many are commercially available.

[0132] Methods of Use

[0133] The cells according to the invention can be used for treating cancer, viral infections or autoimmune disorders in a patient in need thereof. In another embodiment, said isolated cell according to the invention can be used in the manufacture of a medicament for treatment of a cancer, viral infections of autoimmune disorders, in a patient in need thereof.

[0134] The present invention relies on methods for treating patients in need thereof, said method comprising at least one of the following steps: (a) providing a chimeric antigen receptor cells according to the invention and (b) administrating the cells to said patient.

[0135] Said treatment can be ameliorating, curative or prophylactic. It may be either part of an autologous immunotherapy or part of an allogenic immunotherapy treatment. By autologous, it is meant that cells, cell line or population of cells used for treating patients are originating from said patient or from a Human Leucocyte Antigen (HLA) compatible donor. By allogeneic is meant that the cells or population of cells used for treating patients are not originating from said patient but from a donor.

[0136] The invention is particularly suited for allogenic immunotherapy, insofar as it enables the transformation of T-cells, typically obtained from donors, into non-alloreactive cells. This may be done under standard protocols and reproduced as many times as needed. The resulted modified T cells may be pooled and administrated to one or several patients, being made available as an “off the shelf” therapeutic product.

[0137] Cells that can be used with the disclosed methods are described in the previous section. Said treatment can be used to treat patients diagnosed with cancer, viral infection, autoimmune disorders or Graft versus Host Disease (GvHD). Cancers that may be treated include tumors that are not vascularized, or not yet substantially vascularized, as well as vascularized tumors. The cancers may comprise nonsolid tumors (such as hematological tumors, for example, leukemias and lymphomas) or may comprise solid tumors. Types of cancers to be treated with the CARs of the invention include, but are not limited to, carcinoma, blastoma, and sarcoma, and certain leukemia or lymphoid malignancies, benign and malignant tumors, and malignancies e.g., sarcomas, carcinomas, and melanomas. Adult tumors/cancers and pediatric tumors/cancers are also included.

[0138] It can be a treatment in combination with one or more therapies against cancer selected from the group of antibodies therapy, chemotherapy, cytokines therapy, dendritic cell therapy, gene therapy, hormone therapy, laser light therapy and radiation therapy.

[0139] According to a preferred embodiment of the invention, said treatment can be administrated into patients undergoing an immunosuppressive treatment. Indeed, the present invention preferably relies on cells or population of cells, which have been made resistant to at least one immunosuppressive agent due to the inactivation of a gene encoding a receptor for such immunosuppressive agent. In this aspect, the immunosuppressive treatment should help the selection and expansion of the T-cells according to the invention within the patient.

[0140] In a further embodiment, the cell compositions of the present invention are administered to a patient in conjunction with (e.g., before, simultaneously or following) bone marrow transplantation, T cell ablative therapy using either chemotherapy agents such as, fludarabine, external-beam radiation therapy (XRT), cyclophosphamide, or antibodies such as OKT3 or CAM PATH. In another embodiment, the cell compositions of the present invention are administered following B-cell ablative therapy such as agents that react with CD20, e.g., Rittman. For example, in one embodiment, subjects may undergo standard treatment with high dose chemotherapy followed by peripheral blood stem cell transplantation. In certain embodiments, following the transplant, subjects receive an infusion of the expanded immune cells of the present invention. In an additional embodiment, expanded cells are administered before or following surgery. Said modified cells obtained by any one of the methods described here can be used in a particular aspect of the invention for treating patients in need thereof against Host versus Graft (HvG) rejection and Graft versus Host Disease (GvHD); therefore in the scope of the present invention is a method of treating patients in need thereof against Host versus Graft (HvG) rejection and Graft versus Host Disease (GvHD) comprising treating said patient by administering to said patient an effective amount of modified cells comprising inactivated TCR alpha and/or TCR beta genes.

[0141] Administration of Cells

[0142] The invention is particularly suited for allogenic immunotherapy, insofar as it enables the transformation of T-cells, typically obtained from donors, into non-alloreactive cells. This may be done under standard protocols and reproduced as many times as needed. The resulted modified T cells may be pooled and administrated to one or several patients, being made available as an “off the shelf” therapeutic product.

[0143] Depending upon the nature of the cells, the cells may be introduced into a host organism, e.g. a mammal, in a wide variety of ways. The cells may be introduced at the site of the tumor, in specific embodiments, although in alternative embodiments the cells hone to the cancer or are modified to hone to the cancer. The number of cells that are employed will depend upon a number of circumstances, the purpose for the introduction, the lifetime of the cells, the protocol to be used, for example, the number of administrations, the ability of the cells to multiply, the stability of the recombinant construct, and the like. The cells may be applied as a dispersion, generally being injected at or near the site of interest. The cells may be in a physiologically-acceptable medium.

[0144] In some embodiments, the cells are encapsulated to inhibit immune recognition and placed at the site of the tumor.

[0145] The cells may be administered as desired. Depending upon the response desired, the manner of administration, the life of the cells, the number of cells present, various protocols may be employed. The number of administrations will depend upon the factors described above at least in part.

[0146] The administration of the cells or population of cells according to the present invention may be carried out in any convenient manner, including by aerosol inhalation, injection, ingestion, transfusion, implantation or transplantation. The compositions described herein may be administered to a patient subcutaneously, intradermaly, intratumorally, intranodally, intramedullary, intramuscularly, by intravenous or intralymphatic injection, or intraperitoneally. In one embodiment, the cell compositions of the present invention are preferably administered by intravenous injection.

[0147] The administration of the cells or population of cells can consist of the administration of 10⁴-10⁹ cells per kg body weight, preferably 10⁵ to 10⁶ cells/kg body weight including all integer values of cell numbers within those ranges. The cells or population of cells can be administrated in one or more doses. In another embodiment, said effective amount of cells are administrated as a single dose. In another embodiment, said effective amount of cells are administrated as more than one dose over a period time. Timing of administration is within the judgment of managing physician and depends on the clinical condition of the patient. The cells or population of cells may be obtained from any source, such as a blood bank or a donor. While individual needs vary, determination of optimal ranges of effective amounts of a given cell type for a particular disease or conditions within the skill of the art. An effective amount means an amount which provides a therapeutic or prophylactic benefit. The dosage administrated will be dependent upon the age, health and weight of the recipient, kind of concurrent treatment, if any, frequency of treatment and the nature of the effect desired.

[0148] It should be appreciated that the system is subject to many variables, such as the cellular response to the ligand, the efficiency of expression and, as appropriate, the level of secretion, the activity of the expression product, the particular need of the patient, which may vary with time and circumstances, the rate of loss of the cellular activity as a result of loss of cells or expression activity of individual cells, and the like. Therefore, it is expected that for each individual patient, even if there were universal cells which could be administered to the population at large, each patient would be monitored for the proper dosage for the individual, and such practices of monitoring a patient are routine in the art.

[0149] Nucleic Acid-Based Expression Systems

[0150] The CARs of the present invention may be expressed from an expression vector. Recombinant techniques to generate such expression vectors are well known in the art.

[0151] Vectors

[0152] The term “vector” is used to refer to a carrier nucleic acid molecule into which a nucleic acid sequence can be inserted for introduction into a cell where it can be replicated. A nucleic acid sequence can be “exogenous,” which means that it is foreign to the cell into which the vector is being introduced or that the sequence is homologous to a sequence in the cell but in a position within the host cell nucleic acid in which the sequence is ordinarily not found. Vectors include plasmids, cosmids, viruses (bacteriophage, animal viruses, and plant viruses), and artificial chromosomes (e.g., YACs). One of skill in the art would be well equipped to construct a vector through standard recombinant techniques (see, for example, Maniatis et al., 1988 and Ausubel et al., 1994, both incorporated herein by reference).

[0153] The term “expression vector” refers to any type of genetic construct comprising a nucleic acid coding for a RNA capable of being transcribed. In some cases, RNA molecules are then translated into a protein, polypeptide, or peptide. In other cases, these sequences are not translated, for example, in the production of antisense molecules or ribozymes. Expression vectors can contain a variety of “control sequences,” which refer to nucleic acid sequences necessary for the transcription and possibly translation of an operably linked coding sequence in a particular host cell. In addition to control sequences that govern transcription and translation, vectors and expression vectors may contain nucleic acid sequences that serve other functions as well and are described infra.

[0154] Promoters and Enhancers

[0155] A “promoter” is a control sequence that is a region of a nucleic acid sequence at which initiation and rate of transcription are controlled. It may contain genetic elements at which regulatory proteins and molecules may bind, such as RNA polymerase and other transcription factors, to initiate the specific transcription a nucleic acid sequence. The phrases “operatively positioned,” “operatively linked,” “under control,” and “under transcriptional control” mean that a promoter is in a correct functional location and/or orientation in relation to a nucleic acid sequence to control transcriptional initiation and/or expression of that sequence.

[0156] A promoter generally comprises a sequence that functions to position the start site for RNA synthesis. The best known example of this is the TATA box, but in some promoters lacking a TATA box, such as, for example, the promoter for the mammalian terminal deoxynucleotidyl transferase gene and the promoter for the SV40 late genes, a discrete element overlying the start site itself helps to fix the place of initiation. Additional promoter elements regulate the frequency of transcriptional initiation. Typically, these are located in the region 30 110 bp upstream of the start site, although a number of promoters have been shown to contain functional elements downstream of the start site as well. To bring a coding sequence “under the control of” a promoter, one positions the 5′ end of the transcription initiation site of the transcriptional reading frame “downstream” of (i.e., 3′ of) the chosen promoter. The “upstream” promoter stimulates transcription of the DNA and promotes expression of the encoded RNA.

[0157] The spacing between promoter elements frequently is flexible, so that promoter function is preserved when elements are inverted or moved relative to one another. In the tk promoter, the spacing between promoter elements can be increased to 50 bp apart before activity begins to decline. Depending on the promoter, it appears that individual elements can function either cooperatively or independently to activate transcription. A promoter may or may not be used in conjunction with an “enhancer,” which refers to a cis-acting regulatory sequence involved in the transcriptional activation of a nucleic acid sequence.

[0158] A promoter may be one naturally associated with a nucleic acid sequence, as may be obtained by isolating the 5 prime′ non-coding sequences located upstream of the coding segment and/or exon. Such a promoter can be referred to as “endogenous.” Similarly, an enhancer may be one naturally associated with a nucleic acid sequence, located either downstream or upstream of that sequence. Alternatively, certain advantages will be gained by positioning the coding nucleic acid segment under the control of a recombinant or heterologous promoter, which refers to a promoter that is not normally associated with a nucleic acid sequence in its natural environment. A recombinant or heterologous enhancer refers also to an enhancer not normally associated with a nucleic acid sequence in its natural environment. Such promoters or enhancers may include promoters or enhancers of other genes, and promoters or enhancers isolated from any other virus, or prokaryotic or eukaryotic cell, and promoters or enhancers not “naturally occurring,” i.e., containing different elements of different transcriptional regulatory regions, and/or mutations that alter expression. For example, promoters that are most commonly used in recombinant DNA construction include the lactamase (penicillinase), lactose and tryptophan (trp) promoter systems. In addition to producing nucleic acid sequences of promoters and enhancers synthetically, sequences may be produced using recombinant cloning and/or nucleic acid amplification technology, including PCR™, in connection with the compositions disclosed herein (see U.S. Pat. Nos. 4,683,202 and 5,928,906, each incorporated herein by reference). Furthermore, it is contemplated the control sequences that direct transcription and/or expression of sequences within non-nuclear organelles such as mitochondria, chloroplasts, and the like, can be employed as well.

[0159] Naturally, it will be important to employ a promoter and/or enhancer that effectively directs the expression of the DNA segment in the organelle, cell type, tissue, organ, or organism chosen for expression. Those of skill in the art of molecular biology generally know the use of promoters, enhancers, and cell type combinations for protein expression, (see, for example Sambrook et al. 1989, incorporated herein by reference). The promoters employed may be constitutive, tissue-specific, inducible, and/or useful under the appropriate conditions to direct high level expression of the introduced DNA segment, such as is advantageous in the large-scale production of recombinant proteins and/or peptides. The promoter may be heterologous or endogenous.

[0160] Additionally any promoter/enhancer combination could also be used to drive expression. Use of a T3, T7 or SP6 cytoplasmic expression system is another possible embodiment. Eukaryotic cells can support cytoplasmic transcription from certain bacterial promoters if the appropriate bacterial polymerase is provided, either as part of the delivery complex or as an additional genetic expression construct.

[0161] The identity of tissue-specific promoters or elements, as well as assays to characterize their activity, is well known to those of skill in the art.

[0162] A specific initiation signal also may be required for efficient translation of coding sequences. These signals include the ATG initiation codon or adjacent sequences. Exogenous translational control signals, including the ATG initiation codon, may need to be provided. One of ordinary skill in the art would readily be capable of determining this and providing the necessary signals

[0163] In certain embodiments of the invention, the use of internal ribosome entry sites (IRES) elements are used to create multigene, or polycistronic, messages, and these may be used in the invention.

[0164] Vectors can include a multiple cloning site (MCS), which is a nucleic acid region that contains multiple restriction enzyme sites, any of which can be used in conjunction with standard recombinant technology to digest the vector. “Restriction enzyme digestion” refers to catalytic cleavage of a nucleic acid molecule with an enzyme that functions only at specific locations in a nucleic acid molecule. Many of these restriction enzymes are commercially available. Use of such enzymes is widely understood by those of skill in the art. Frequently, a vector is linearized or fragmented using a restriction enzyme that cuts within the MCS to enable exogenous sequences to be ligated to the vector. “Ligation” refers to the process of forming phosphodiester bonds between two nucleic acid fragments, which may or may not be contiguous with each other. Techniques involving restriction enzymes and ligation reactions are well known to those of skill in the art of recombinant technology.

[0165] Splicing sites, termination signals, origins of replication, and selectable markers may also be employed.

[0166] Plasmid Vectors

[0167] In certain embodiments, a plasmid vector is contemplated for use to transform a host cell. In general, plasmid vectors containing replicon and control sequences which are derived from species compatible with the host cell are used in connection with these hosts. The vector ordinarily carries a replication site, as well as marking sequences which are capable of providing phenotypic selection in transformed cells. In a non-limiting example, E. coli is often transformed using derivatives of pBR322, a plasmid derived from an E. coli species. pBR322 contains genes for ampicillin and tetracycline resistance and thus provides easy means for identifying transformed cells. The pBR plasmid, or other microbial plasmid or phage must also contain, or be modified to contain, for example, promoters which can be used by the microbial organism for expression of its own proteins.

[0168] In addition, phage vectors containing replicon and control sequences that are compatible with the host microorganism can be used as transforming vectors in connection with these hosts. For example, the phage lambda GEM™ 11 may be utilized in making a recombinant phage vector which can be used to transform host cells, such as, for example, E. coli LE392.

[0169] Further useful plasmid vectors include pIN vectors (Inouye et al., 1985); and pGEX vectors, for use in generating glutathione S transferase (GST) soluble fusion proteins for later purification and separation or cleavage. Other suitable fusion proteins are those with galactosidase, ubiquitin, and the like.

[0170] Bacterial host cells, for example, E. coli, comprising the expression vector, are grown in any of a number of suitable media, for example, LB. The expression of the recombinant protein in certain vectors may be induced, as would be understood by those of skill in the art, by contacting a host cell with an agent specific for certain promoters, e.g., by adding IPTG to the media or by switching incubation to a higher temperature. After culturing the bacteria for a further period, generally of between 2 and 24 h, the cells are collected by centrifugation and washed to remove residual media.

[0171] Viral Vectors

[0172] The ability of certain viruses to infect cells or enter cells via receptor mediated endocytosis, and to integrate into host cell genome and express viral genes stably and efficiently have made them attractive candidates for the transfer of foreign nucleic acids into cells (e.g., mammalian cells). Components of the present invention may be a viral vector that encodes one or more CARs of the invention. Non-limiting examples of virus vectors that may be used to deliver a nucleic acid of the present invention are described below.

[0173] Adenoviral Vectors

[0174] A particular method for delivery of the nucleic acid involves the use of an adenovirus expression vector. Although adenovirus vectors are known to have a low capacity for integration into genomic DNA, this feature is counterbalanced by the high efficiency of gene transfer afforded by these vectors. “Adenovirus expression vector” is meant to include those constructs containing adenovirus sequences sufficient to (a) support packaging of the construct and (b) to ultimately express a tissue or cell specific construct that has been cloned therein. Knowledge of the genetic organization or adenovirus, a 36 kb, linear, double stranded DNA virus, allows substitution of large pieces of adenoviral DNA with foreign sequences up to 7 kb (Grunhaus and Horwitz, 1992).

[0175] AAV Vectors

[0176] The nucleic acid may be introduced into the cell using adenovirus assisted transfection. Increased transfection efficiencies have been reported in cell systems using adenovirus coupled systems (Kelleher and Vos, 1994; Cotten et al., 1992; Curiel, 1994). Adeno associated virus (AAV) is an attractive vector system for use in the cells of the present invention as it has a high frequency of integration and it can infect nondividing cells, thus making it useful for delivery of genes into mammalian cells, for example, in tissue culture (Muzyczka, 1992) or in vivo. AAV has a broad host range for infectivity (Tratschin et al., 1984; Laughlin et al., 1986; Lebkowski et al., 1988; McLaughlin et al., 1988). Details concerning the generation and use of rAAV vectors are described in U.S. Pat. Nos. 5,139,941 and 4,797,368, each incorporated herein by reference.

[0177] Retroviral Vectors

[0178] Retroviruses are useful as delivery vectors because of their ability to integrate their genes into the host genome, transferring a large amount of foreign genetic material, infecting a broad spectrum of species and cell types and of being packaged in special cell lines (Miller, 1992).

[0179] In order to construct a retroviral vector, a nucleic acid (e.g., one encoding the desired sequence) is inserted into the viral genome in the place of certain viral sequences to produce a virus that is replication defective. In order to produce virions, a packaging cell line containing the gag, pol, and env genes but without the LTR and packaging components is constructed (Mann et al., 1983). When a recombinant plasmid containing a cDNA, together with the retroviral LTR and packaging sequences is introduced into a special cell line (e.g., by calcium phosphate precipitation for example), the packaging sequence allows the RNA transcript of the recombinant plasmid to be packaged into viral particles, which are then secreted into the culture media (Nicolas and Rubenstein, 1988; Temin, 1986; Mann et al., 1983). The media containing the recombinant retroviruses is then collected, optionally concentrated, and used for gene transfer. Retroviral vectors are able to infect a broad variety of cell types. However, integration and stable expression require the division of host cells (Paskind et al., 1975).

[0180] Lentiviruses are complex retroviruses, which, in addition to the common retroviral genes gag, pol, and env, contain other genes with regulatory or structural function. Lentiviral vectors are well known in the art (see, for example, Naldini et al., 1996; Zufferey et al., 1997; Blomer et al., 1997; U.S. Pat. Nos. 6,013,516 and 5,994,136). Some examples of lentivirus include the Human Immunodeficiency Viruses: HIV-1, HIV-2 and the Simian Immunodeficiency Virus: SIV. Lentiviral vectors have been generated by multiply attenuating the HIV virulence genes, for example, the genes env, vif, vpr, vpu and nef are deleted making the vector biologically safe.

[0181] Recombinant lentiviral vectors are capable of infecting non-dividing cells and can be used for both in vivo and ex vivo gene transfer and expression of nucleic acid sequences. For example, recombinant lentivirus capable of infecting a non-dividing cell wherein a suitable host cell is transfected with two or more vectors carrying the packaging functions, namely gag, pol and env, as well as rev and tat is described in U.S. Pat. No. 5,994,136, incorporated herein by reference. One may target the recombinant virus by linkage of the envelope protein with an antibody or a particular ligand for targeting to a receptor of a particular cell-type. By inserting a sequence (including a regulatory region) of interest into the viral vector, along with another gene which encodes the ligand for a receptor on a specific target cell, for example, the vector is now target-specific.

[0182] Other Viral Vectors

[0183] Other viral vectors may be employed as vaccine constructs in the present invention. Vectors derived from viruses such as vaccinia virus (Ridgeway, 1988; Baichwal and Sugden, 1986; Coupar et al., 1988), sindbis virus, cytomegalovirus and herpes simplex virus may be employed. They offer several attractive features for various mammalian cells (Friedmann, 1989; Ridgeway, 1988; Baichwal and Sugden, 1986; Coupar et al., 1988; Horwich et al., 1990).

[0184] Delivery Using Modified Viruses

[0185] A nucleic acid to be delivered may be housed within an infective virus that has been engineered to express a specific binding ligand. The virus particle will thus bind specifically to the cognate receptors of the target cell and deliver the contents to the cell. A novel approach designed to allow specific targeting of retrovirus vectors was developed based on the chemical modification of a retrovirus by the chemical addition of lactose residues to the viral envelope. This modification can permit the specific infection of hepatocytes via sialoglycoprotein receptors.

[0186] Another approach to targeting of recombinant retroviruses was designed in which biotinylated antibodies against a retroviral envelope protein and against a specific cell receptor were used. The antibodies were coupled via the biotin components by using streptavidin (Roux et al., 1989). Using antibodies against major histocompatibility complex class I and class II antigens, they demonstrated the infection of a variety of human cells that bore those surface antigens with an ecotropic virus in vitro (Roux et al., 1989).

[0187] Vector Delivery and Cell Transformation

[0188] Suitable methods for nucleic acid delivery for transfection or transformation of cells are known to one of ordinary skill in the art. Such methods include, but are not limited to, direct delivery of DNA such as by ex vivo transfection, by injection, and so forth. Through the application of techniques known in the art, cells may be stably or transiently transformed.

[0189] Ex Vivo Transformation

[0190] Methods for transfecting eukaryotic cells and tissues removed from an organism in an ex vivo setting are known to those of skill in the art. Thus, it is contemplated that cells or tissues may be removed and transfected ex vivo using nucleic acids of the present invention. In particular aspects, the transplanted cells or tissues may be placed into an organism. In preferred facets, a nucleic acid is expressed in the transplanted cells.

### Kits of the Invention

[0191] Any of the compositions described herein may be comprised in a kit. In a non-limiting example, one or more cells for use in cell therapy and/or the reagents to generate one or more cells for use in cell therapy that harbors recombinant expression vectors may be comprised in a kit. The kit components are provided in suitable container means.

[0192] Some components of the kits may be packaged either in aqueous media or in lyophilized form. The container means of the kits will generally include at least one vial, test tube, flask, bottle, syringe or other container means, into which a component may be placed, and preferably, suitably aliquoted. Where there are more than one component in the kit, the kit also will generally contain a second, third or other additional container into which the additional components may be separately placed. However, various combinations of components may be comprised in a vial. The kits of the present invention also will typically include a means for containing the components in close confinement for commercial sale. Such containers may include injection or blow molded plastic containers into which the desired vials are retained.

[0193] When the components of the kit are provided in one and/or more liquid solutions, the liquid solution is an aqueous solution, with a sterile aqueous solution being particularly ueful. In some cases, the container means may itself be a syringe, pipette, and/or other such like apparatus, from which the formulation may be applied to an infected area of the body, injected into an animal, and/or even applied to and/or mixed with the other components of the kit.

[0194] However, the components of the kit may be provided as dried powder(s). When reagents and/or components are provided as a dry powder, the powder can be reconstituted by the addition of a suitable solvent. It is envisioned that the solvent may also be provided in another container means. The kits may also comprise a second container means for containing a sterile, pharmaceutically acceptable buffer and/or other diluent.

[0195] In particular embodiments of the invention, cells that are to be used for cell therapy are provided in a kit, and in some cases the cells are essentially the sole component of the kit. The kit may comprise reagents and materials to make the desired cell. In specific embodiments, the reagents and materials include primers for amplifying desired sequences, nucleotides, suitable buffers or buffer reagents, salt, and so forth, and in some cases the reagents include vectors and/or DNA that encodes a CAR as described herein and/or regulatory elements therefor.

[0196] In particular embodiments, there are one or more apparatuses in the kit suitable for extracting one or more samples from an individual. The apparatus may be a syringe, scalpel, and so forth.

[0197] In some cases of the invention, the kit, in addition to cell therapy embodiments, also includes a second cancer therapy, such as chemotherapy, hormone therapy, and/or immunotherapy, for example. The kit(s) may be tailored to a particular cancer for an individual and comprise respective second cancer therapies for the individual.

[0198] Combination Therapy

[0199] In certain embodiments of the invention, methods of the present invention for clinical aspects are combined with other agents effective in the treatment of hyperproliferative disease, such as anti-cancer agents. An “anti-cancer” agent is capable of negatively affecting cancer in a subject, for example, by killing cancer cells, inducing apoptosis in cancer cells, reducing the growth rate of cancer cells, reducing the incidence or number of metastases, reducing tumor size, inhibiting tumor growth, reducing the blood supply to a tumor or cancer cells, promoting an immune response against cancer cells or a tumor, preventing or inhibiting the progression of cancer, or increasing the lifespan of a subject with cancer. More generally, these other compositions would be provided in a combined amount effective to kill or inhibit proliferation of the cell. This process may involve contacting the cancer cells with the expression construct and the agent(s) or multiple factor(s) at the same time. This may be achieved by contacting the cell with a single composition or pharmacological formulation that includes both agents, or by contacting the cell with two distinct compositions or formulations, at the same time, wherein one composition includes the expression construct and the other includes the second agent(s).

[0200] Tumor cell resistance to chemotherapy and radiotherapy agents represents a major problem in clinical oncology. One goal of current cancer research is to find ways to improve the efficacy of chemo- and radiotherapy by combining it with other therapies. In the context of the present invention, it is contemplated that cell therapy could be used similarly in conjunction with chemotherapeutic, radiotherapeutic, or immunotherapeutic intervention, as well as pro-apoptotic or cell cycle regulating agents.

[0201] Alternatively, the present inventive therapy may precede or follow the other agent treatment by intervals ranging from minutes to weeks. In embodiments where the other agent and present invention are applied separately to the individual, one would generally ensure that a significant period of time did not expire between the time of each delivery, such that the agent and inventive therapy would still be able to exert an advantageously combined effect on the cell. In such instances, it is contemplated that one may contact the cell with both modalities within about 12-24 h of each other and, more preferably, within about 6-12 h of each other. In some situations, it may be desirable to extend the time period for treatment significantly, however, where several d (2, 3, 4, 5, 6 or 7) to several wk (1, 2, 3, 4, 5, 6, 7 or 8) lapse between the respective administrations.

[0202] It is expected that the treatment cycles would be repeated as necessary. It also is contemplated that various standard therapies, as well as surgical intervention, may be applied in combination with the inventive cell therapy.

[0203] Chemotherapy

[0204] Cancer therapies also include a variety of combination therapies with both chemical and radiation based treatments. Combination chemotherapies include, for example, abraxane, altretamine, docetaxel, herceptin, methotrexate, novantrone, zoladex, cisplatin (CDDP), carboplatin, procarbazine, mechlorethamine, cyclophosphamide, camptothecin, ifosfamide, melphalan, chlorambucil, busulfan, nitrosurea, dactinomycin, daunorubicin, doxorubicin, bleomycin, plicomycin, mitomycin, etoposide (VP16), tamoxifen, raloxifene, estrogen receptor binding agents, taxol, gemcitabien, navelbine, farnesyl-protein tansferase inhibitors, transplatinum, 5-fluorouracil, vincristin, vinblastin and methotrexate, or any analog or derivative variant of the foregoing and also combinations thereof.

[0205] In specific embodiments, chemotherapy for the individual is employed in conjunction with the invention, for example before, during and/or after administration of the invention

[0206] Radiotherapy

[0207] Other factors that cause DNA damage and have been used extensively include what are commonly known as .gamma.-rays, X-rays, and/or the directed delivery of radioisotopes to tumor cells. Other forms of DNA damaging factors are also contemplated such as microwaves and UV-irradiation. It is most likely that all of these factors effect a broad range of damage on DNA, on the precursors of DNA, on the replication and repair of DNA, and on the assembly and maintenance of chromosomes. Dosage ranges for X-rays range from daily doses of 50 to 200 roentgens for prolonged periods of time (3 to 4 wk), to single doses of 2000 to 6000 roentgens. Dosage ranges for radioisotopes vary widely, and depend on the half-life of the isotope, the strength and type of radiation emitted, and the uptake by the neoplastic cells.

[0208] The terms “contacted” and “exposed,” when applied to a cell, are used herein to describe the process by which a therapeutic construct and a chemotherapeutic or radiotherapeutic agent are delivered to a target cell or are placed in direct juxtaposition with the target cell. To achieve cell killing or stasis, both agents are delivered to a cell in a combined amount effective to kill the cell or prevent it from dividing.

[0209] Immunotherapy

[0210] Immunotherapeutics generally rely on the use of immune effector cells and molecules to target and destroy cancer cells. The immune effector may be, for example, an antibody specific for some marker on the surface of a tumor cell. The antibody alone may serve as an effector of therapy or it may recruit other cells to actually effect cell killing. The antibody also may be conjugated to a drug or toxin (chemotherapeutic, radionuclide, ricin A chain, cholera toxin, pertussis toxin, etc.) and serve merely as a targeting agent. Alternatively, the effector may be a lymphocyte carrying a surface molecule that interacts, either directly or indirectly, with a tumor cell target. Various effector cells include cytotoxic T cells and NK cells.

[0211] Immunotherapy other than the inventive therapy described herein could thus be used as part of a combined therapy, in conjunction with the present cell therapy. The general approach for combined therapy is discussed below. Generally, the tumor cell must bear some marker that is amenable to targeting, i.e., is not present on the majority of other cells. Many tumor markers exist and any of these may be suitable for targeting in the context of the present invention. Common tumor markers include PD-1, PD-L1, CTLA4, carcinoembryonic antigen, prostate specific antigen, urinary tumor associated antigen, fetal antigen, tyrosinase (p97), gp68, TAG-72, HMFG, Sialyl Lewis Antigen, MucA, MucB, PLAP, estrogen receptor, laminin receptor, erb B and p155.

[0212] Genes

[0213] In yet another embodiment, the secondary treatment is a gene therapy in which a therapeutic polynucleotide is administered before, after, or at the same time as the present invention clinical embodiments. A variety of expression products are encompassed within the invention, including inducers of cellular proliferation, inhibitors of cellular proliferation, or regulators of programmed cell death.

[0214] Surgery

[0215] Approximately 60% of persons with cancer will undergo surgery of some type, which includes preventative, diagnostic or staging, curative and palliative surgery. Curative surgery is a cancer treatment that may be used in conjunction with other therapies, such as the treatment of the present invention, chemotherapy, radiotherapy, hormonal therapy, gene therapy, immunotherapy and/or alternative therapies.

[0216] Curative surgery includes resection in which all or part of cancerous tissue is physically removed, excised, and/or destroyed. Tumor resection refers to physical removal of at least part of a tumor. In addition to tumor resection, treatment by surgery includes laser surgery, cryosurgery, electrosurgery, and miscopically controlled surgery (Mohs' surgery). It is further contemplated that the present invention may be used in conjunction with removal of superficial cancers, precancers, or incidental amounts of normal tissue.

[0217] Upon excision of part of all of cancerous cells, tissue, or tumor, a cavity may be formed in the body. Treatment may be accomplished by perfusion, direct injection or local application of the area with an additional anti-cancer therapy. Such treatment may be repeated, for example, every 1, 2, 3, 4, 5, 6, or 7 days, or every 1, 2, 3, 4, and 5 weeks or every 1, 2, 3, 4, 5, 6, 7, 8, 9, 10, 11, or 12 months. These treatments may be of varying dosages as well.

[0218] Other Agents

[0219] It is contemplated that other agents may be used in combination with the present invention to improve the therapeutic efficacy of treatment. These additional agents include immunomodulatory agents, agents that affect the upregulation of cell surface receptors and GAP junctions, cytostatic and differentiation agents, inhibitors of cell adhesion, or agents that increase the sensitivity of the hyperproliferative cells to apoptotic inducers. Immunomodulatory agents include tumor necrosis factor; interferon alpha, beta, and gamma; IL-2 and other cytokines; F42K and other cytokine analogs; or MIP-1, MIP-1beta, MCP-1, RANTES, and other chemokines. It is further contemplated that the upregulation of cell surface receptors or their ligands such as Fas/Fas ligand, DR4 or DR5/TRAIL would potentiate the apoptotic inducing abililties of the present invention by establishment of an autocrine or paracrine effect on hyperproliferative cells. Increases intercellular signaling by elevating the number of GAP junctions would increase the anti-hyperproliferative effects on the neighboring hyperproliferative cell population. In other embodiments, cytostatic or differentiation agents can be used in combination with the present invention to improve the anti-hyerproliferative efficacy of the treatments. Inhibitors of cell adhesion are contemplated to improve the efficacy of the present invention. Examples of cell adhesion inhibitors are focal adhesion kinase (FAKs) inhibitors and Lovastatin. It is further contemplated that other agents that increase the sensitivity of a hyperproliferative cell to apoptosis, such as the antibody c225, could be used in combination with the present invention to improve the treatment efficacy.

### EXAMPLES

### Example 1: Materials and Methods

[0220] Cells, Culture Media and Reagents.

[0221] Human CAIX+ renal cell carcinoma cell lines sk-rc-52, sk-rc-09 and CAIX− sk-rc-59 were obtained from Dr. Gerd Ritter, Memorial Sloan-Kettering Cancer Center, New York. They were cultured at 37° C. with 5% CO₂ in R-10 complete medium containing RPMI 1640 medium (Life Technologies) supplemented with 10% FCS, 2 mmol/L L-glutamine, 100 U/ml penicillin, and 100 μg/ml streptomycin (Sigma). Primary human T cells were maintained in R-10 with 10% human serum and 100 IU/ml recombinant human interleukin 2 (IL-2) (Chiron). Human embryonic kidney cell line 293T (ATCC) and mouse fibroblast NIH3T3 cells (ATCC) were grown in D-10 complete medium (Life Technologies) containing DMEM medium with 10% FCS, 100 U/ml penicillin, and 100 μg/ml streptomycin (Sigma). Leukopacks obtained from the blood bank of the Children's Hospital Boston were collected from healthy volunteers with written informed consent.

[0222] In one embodiment, Human ccRCC cell lines, Skrc52, originally CAIX+/PD-L1−, and Skrc59, originally CAIX−/PD-L1+, were obtained from Dr. Gerd Ritter (Memorial Sloan-Kettering Cancer Center, New York). These cells were cultivated in RPMI 1640 Medium (Life Technologies) supplemented with 10% (v/v) heat-inactivated fetal bovine serum (FBS, Gibco), 100 IU/ml penicillin and 100 μg/ml streptomycin. 293T (CRL-11268, ATCC) and Lenti-X 293T (Clontech) cells were grown in DMEM Medium (Life Technologies) supplemented with 10% FBS, 100 IU/ml penicillin and 100 μg/ml streptomycin. All cell lines used in this project were transduced with luciferase through lentiviral transduction and maintained at 37° C. with 5% CO2. The Skrc52 cells were selected for CAIX−/PD-L1− and CAIX+/PD-L1− cell populations by Fluorescence activated cell sorting (FACS) sorting. Skrc59 cells were engineered to express high levels of human CAIX and CAIX+/PD-L1+ were selected by FACS sorting.

[0223] Cloning of Anti-PD-L1 scFv-Fc IgG1 and IgG4 into a Bicistronic Lentiviral Vector Encoding an Anti-CAIX 2^{nd} Generation CAR

[0224] The anti-PD-L1 antibody (Ab) used to construct the CART cells was previously selected using a 27-billion-member human scFv phage display library against a full length PD-L1 in the form of paramagnetic proteoliposomes (manuscript in preparation). The DNA sequences that encoded the anti-PD-L1 scFv (Clone 42)-Fc IgG1 or IgG4 were codon optimized and synthesized (Genewiz) containing the restriction sites for 5′ NdeI and 3′ ClaI to allow further scFv-Fc cloning to replace ZsGreen in the lentiviral vector pHAGE-eIFα signal-scFvG36 (anti-CAIX)-C9TAG-linker-CD28-CD3ζ-IRES-ZsGreen (e.g. CD28z). This anti-CAIX original vector was previously constructed and published (21). For the cloning of the negative controls, firstly we replaced anti-PD-L1 scFv with an anti-Severe Acute Respiratory Syndrome (SARS) scFv (Clone 11A) in the IgG1-Fc lentiviral vector containing the anti-CAIX G36 scFv CAR. The DNA sequence that coded for the anti-SARS scFv was amplified by PCR from the plasmid pHAGE CMV-Anti-SARS (11A) scFv-Fc-CD28-gp41-IRES-ZsGreen to insert the restriction sites for 5′ MluI and 3′ XbaI for further cloning using the MluI forward primer 5′ TCG ACG CGT GAG GTG CAG CTG GTG CAG T 3′ and XbaI reverse primer 5′ TCC TCT AGA CAG GAC GGT GAC CTT GGT CC 3′. The final pHAGE-eIFα-scFv G36 (anti-CAIX)-C9TAG-linker-CD28-CD3ζ-IRES-anti-SARS (11A) IgG1 was used as one of the negative controls. We also replaced the anti-CAIX scFv in the CAR structure containing the anti-SARS IgG1 for the anti-B cell maturation antigen (BCMA) scFv by double digestion of the pHAGE-eIFα-A716scFv (anti-BCMA)-C9TAG-linker-CD28-CD3ζ-IRES-ZsGreen and the pHAGE-eIFα-G36scFv(anti-CAIX)-C9TAG-linker-CD28-CD3ζ-IRES-anti-SARS(11A) IgG1 with NcoI and NotI After the cloning processes we obtained four main plasmids to start the Lentiviruses production: Anti-CAIX CAR able to express anti-PD-L1 IgG1 (anti-CAIX/anti-PD-L1 IgG1), anti-CAIX CAR able to express anti-PD-L1 IgG4 (anti-CAIX/anti-PD-L1 IgG4), anti-CAIX CAR able to express an irrelevant anti-SARS Ab (anti-CAIX/anti-SARS IgG1) and anti-BCMA CAR able to express an irrelevant anti-SARS Ab (anti-BCMA/anti-SARS IgG1).

[0225] scFv Isolation and Conversion of scFv to scFv-Fc.

[0226] CAIX-specific scFv antibodies were isolated from a non-immune human scFv phage library as previously reported and submitted to GenBank with accession numbers of GQ903548-GQ903561²³. scFv-coding DNA fragments from the pFarber phagemid were digested with SfiI/NotI sites and subcloned into the mammalian expression vector pcDNA3.1-F105L-hinge-stuffer which has a human IgG1 F105 leader sequence and the human IgG1 hinge-CH2-CH3 Fc portion to express scFv-Fc antibodies. Plasmids of scFv-Fc were transiently transfected into 293T cells by lipofectamine 2000 (Invitrogen), and expressed antibodies were purified using Sepharose protein A beads (Amersham Bioscience). Specific binding to CAIX was tested by staining with phage scFv antibodies or scFv converted into scFv-Fc format antibodies by incubation with CAIX-expressing 293T and sk-rc-52 cell lines, and with CAIX negative 293T and sk-rc-59 cell lines. In these experiments, irrelevant anti-HIV CCRS antibody (clone A8)²⁵ or anti-SARS antibody (11A)²⁴ and fluorescently conjugated secondary antibodies alone were used as negative controls.

[0227] Construction of scFv-CD8-TCRζ and scFv-CD28-TCRζ Constructs.

[0228] Pz1, scFv-CD8-TCRζ, and P28z, scFv-CD28-TCRζ, DNA constructs in phagemid vector pSL1180 were obtained from Dr. Michel Sadelain, Memorial Sloan-Kettering Cancer Center, New York. In Pz1, the scFv and TCRζ intracellular domain are appended to N- and C-terminus of human CD8a chain, respectively. Similarly, in P28z, the scFv and TCRζ sequences are appended to the N- and C-terminus of human CD28, respectively. The amino acid sequence of human CD8a is 71 residues in length, consisting of 47 (aa 137-183), 23 (aa 184-206), and 2 (aa 207-208) residues of the CD8a extracellular and hinge, transmembrane, and cytoplasmic domains, respectively. The CD28 sequence in P28z is 107 residues in length, consisting of 40 (aa 114-153), 23 (aa 154-176), and 44 (aa 177-220) residues of the CD28 extracellular, transmembrane, and cytoplasmic domains respectively. The human CD3ζ intracellular domain common to both CARs consists of 112 amino acids (aa 52-163).

[0229] The nucleic acid sequence encoding an internal C9-tag (a nine-amino acid peptide of human rhodopsin, TETSQVAPA) with a GGGGS linker was amplified by PCR and was fused upstream with CD8-TCRζ and CD28-TCRζ sequences with 5′ NotI site and 3′ PacI sites. The primers used for cloning chimeric TCRζ constructs are

5′ TAG GGC GCG GCC GCa acc gag acc agc cag gtg
gcg ccc gcc GGG GGA GGA GGC AGC CCC ACC ACG ACG
CCA GCG CCG CGA 3′

(forward primer for CD8 construct where italic is the NotI site, upper case is the C9 tag sequence, and underlining indicates the GGGGS linker),

5′ TAG GGC GCG GCC GCa acc gag acc agc cag gtg
gcg ccc gcc GGC GGA GGA GGC AGC ATT GAA GTT ATG
TAT CCT CCT CCT 3′

(forward primer for CD28 construct) and reverse primer for both constructs CTA GCC TT AAT TAA, TTA GCG AGG AGG GGG CAG GGC CTG CAT, italic is Pac I site. These DNA fragments encoded functional features which are arranged in accordance with the following sequence: NotI-C9tag (TETSQVQPQ)-GGGGS-CD8 or CD28-TCRζ-PacI. The chimeric TCR constructs tagged with internal C9 peptide were cloned into the pcDNA3.1-F105L-hinge stuffer vector containing anti-CXCR4 scFv-Fc, clone 48, using NotI and PacI restriction sites. This design allowed us to insert chimeric TCR receptor constructs to replace Fc portion fragment. Later, anti-CAIX scFv (clone G36) and anti-CCRS scFv (clone A8, as irrelevant scFv control) antibody fragments were cloned to replace anti-CXCR4 scFv at SfiI/NotI sites to create CAIX-specific chimeric TCR constructs.

[0230] The lentivirus vector pHAGE-CMV-DsRed-IRES-ZsGreen, and four HIV helper plasmids pHDM-Hgpm2 (HIV gag-pol), pMD-tat, pRC/CMV-rev, and an Env VSV-G pseudotype were obtained from Dr. Richard Mulligan, of the Virus Production Core at The Harvard Gene Therapy Initiative in Boston. The CMV promoter in pHAGE-CMV-IRES-ZsGreen was replaced by an EF1α promoter derived from the pSIN lentivirus vector at SpeI/NotI sites. One of the 5 scFv-Fc antibodies, G36, which possess high affinity to CAIX+ cells and high ADCC only against CAIX+ tumor cells, was cloned into pHAGE-EF1α lentivirus vector at AscI/BamHI to replace the first cassette of the DsRed protein.

[0231] Production of Lentivirus and Transduction of Human Primary T Cells.

[0232] Lentivirus was produced by five plasmid transient transfection into 293T cells using lipofectamine 2000 as per the manufacturer's instructions (Invitrogen). Cells were prepared for 80% confluence in 15 cm Petri dishes (Nalge Nunc) and transfected with 30 μg of total plasmid DNA. The ratio of vector plasmids (pHDM-Hgpm2 (HIV gag-pol): pMD-tat: pRC/CMV-rev: Env VSV-G pseudotype) was 20:1:1:1:2. After changing to D-10 medium, virus supernatant was harvested on day 3, filtrated through a 0.45 μm filter, and concentrated by ultracentrifugation (Beckman Coulter, Fullerton, Calif.) for 90 minutes at 16,500 rpm (48,960×g, Beckman SW28 rotor) and 4° C. The virus pellets were resuspended in R-10 medium and kept frozen at −80° C.

[0233] In one embodiment, Lentiviruses were produced by transient transfection of five plasmids into 293T cells using Polyethyleneimine (PEI). Briefly, each 80% confluent 293T cells in 15 cm plate (Nalge Nunc) was transfected with 30 μg of total five plasmids, being 5 μg of each structural plasmid pHDH-Hgpm2 (HIV gag-pol), pMD-tat; pRC/CMV-rev and Env VSV-G, and 10 μg of the main plasmid codifying the CAR (anti-CAIX/anti-PD-L1 IgG1, anti-CAIX/anti-PD-L1 IgG4, anti-CAIX/anti SARS IgG1 or anti-BCMA/anti SARS IgG1). The virus supernatant was concentrated using Lenti-X Concentrator (Clontech), following the manufacturer instructions, and kept frozen at −80° C.

[0234] Human PBMCs were isolated by ficoll density gradient separation and were activated with 2 μg/ml PHA (Sigma) plus 100 IU/ml human IL-2 for 4 days. The cells were infected with two or three rounds of lentivirus transduction at multiplicity of infection (MOI) of 10-20 in the presence of 10 μg/ml DEAE. Three days after transduction, transduced T cells were collected for phenotypic and functional analyses in vitro, or were expanded for in vivo experiments.

[0235] Selection, Activation and Lentivector Trasduction of CD8+ T Cells.

[0236] Blood collars collected from healthy volunteers with written informed consent were obtained from the blood bank of the Brigham and Woman's Hospital (Boston, Mass.). The isolation of human peripheral blood mononuclear cells (PBMCs) was performed using Ficoll-Paque PLUS (GE Healthcare, NJ). The Dynabeads for CD8 Positive Isolation (Life Technologies) were used to isolate CD8 positive cells from PBMCs, which were cultured in RPMI 1640 medium (Life Technologies) with 10% heat inactivated fetal bovine serum, 20 mM HEPES, 100 IU/ml penicillin and 100 μg/ml streptomycin and 50 IU/mL of IL-21 (Peprotech) was added in the medium every 2 days. The assays performed to determine if IL-2 or IL-21 were the best cytokine to induce anti-CAIX CART cells proliferation were performed with 50 IU/mL of each cytokine. The CD8+ T cells were activated with Dynabeads Human T-Activator CD3/CD28 (Life Technologies) using a ratio of 1:1. The cells were transduced with the Lentiviruses at a multiplicity of infection of 20 and 10 μg/mL of Diethylaminoethyl. All the assays were performed in triplicate and using T cells from three different healthy donors.

[0237] Flow Cytometric Analysis.

[0238] Transduction efficiency of human primary T cells was assessed by expression of a reporter gene (ZsGreen). The CAIX-Fc protein was expressed from a pcDNA3.1 plasmid that encoded amino acids 38-397 of CAIX followed by human IgG1 hinge, CH2 and CH3 domains, the CAIX signal peptide (aa 1-37) was replaced with Ig leader sequence. Expression of scFv(G250) on transduced T cells was tested by staining the cells with 1 μg CAIX-Fc protein, and then APC-conjugated mouse anti-human IgG antibody (Jackson ImmunoResearch). Additionally, expression of the internal rhodopsin nonapeptide (TETSQVAPA) C9 tag of the scFv domain of TCR constructs on transduced T cells was detected by staining with 5 μg mouse 1D4 antibody followed by APC-conjugated goat anti-mouse IgG antibody (Jackson ImmunoResearch). For analysis, the subsets of human cells in culture during clonal expansion experiment were stained with fluorescence conjugated mouse anti-human antibodies (Invitrogen) against CD3 (clone S4.1), CD4 (clone S3.5) or CD8 (clone 3B5). In all cell staining, five hundred thousand cells were stained with antibodies at recommended concentration according to company's instruction. The matched isotype control antibodies for each sample were used and the cells were analyzed using a FACSCalibur cytometer (Becton-Dickinson).

[0239] In one embodiment, transduction of 293T cells or CD8+ T cells was confirmed by FACS analysis of the anti-CAIX or anti-BCMA expression. The cells were stained with 10 μg/mL of human CAIX-Fc produced in our lab or human BCMA-mouse-Fc (AB Bioscience) and then developed with 1:250 APC-conjugated mouse anti-human IgG Ab (Southern Biotech) or goat-anti mouse IgG Ab (Biolegend), respectively. CountBright™ Absolute Counting Beads (Molecular Probes) was used for the proliferation and clonal expansion assays. All samples were analyzed with an LSR Fortessa or with a FACSCalibur (BD Bioscience) and data were analyzed using FlowJo software. To analyze the status of T cell exhaustion of the CART cells they were cultured in the presence of IL-21 50 U/mL (Peprotech) and Dynabeads Human T Activator CD3/CD28 for five days. After this period the CART cells were co-cultured with Skrc-59 CAIX+ PD-L1+ cells for 2 days in order to stimulate exhaustion. 1×106 CART cells from this assay and Tumor-infiltrating Lymphocytes (TIL) collected from the in vivo assay were stained with FITC-conjugated anti-human PD-1, PE-conjugated anti-human Tim3, PerCP/Cy5.5-conjugated anti-human Lag3 antibodies (Biolegend) and Pacific Blue-conjugated anti-human CD45 and analyzed by FACS. To verify the expression levels of CAIX and PD-L1 in the different RCC cell lineages used in this project, we used 10 μg/mL of the anti-human CAIX mAb (Clone G36), produced in our laboratory, and 10 μg/mL of the biotinylated mouse anti-human PD-L1 (Biolegend). The primary antibodies were detected using 1:250 APC-conjugated anti-human Ab and PE-conjugated avidin, respectively, and analyzed by FACS.

[0240] ADCC and Cytotoxicity Assay of Lentivirus Transduced T Cells.

[0241] Cytotoxicity assays were performed using the DELFIA EuTDA Cytotoxicity kit (Perkin Elmer, Boston, Mass.) in accordance with the manufacturer's instructions. Briefly, target tumor cells were labeled with a fluorescent ligand (BATDA) for 30 minutes at 37° C. and 1×10⁴ labeled cells were loaded per well in 96-well U-bottom plate. For antibody-dependent cellular cytotoxicity (ADCC) assay, a panel of anti-CAIX scFv-Fc antibodies or irrevelant scFv-Fc antibody at a concentration of 1 μg/ml or 5 μg/ml was added separately. The assay was set up with ratios of effector cells (human PBMC) to target cells (E:T) at 50:1, 25:1 and 12.5:1. For the T cell cytoxicity assay, different ratios of effector cells (nontransduced or transduced T cells) to target cells (E:T) were prepared (100:1, 50:1 and 25:1). The culture was incubated for 4 hours in humidified 5% CO₂ at 37° C. After the plate was spun for 5 minutes at 500× g, 20 μl of supernatant was transferred to a flat-bottom plate. 200 μl of Europium solution was added and the fluorescence released from the cells was read by fluorometer (Victor™, PerkinElmer). The control for spontaneous release was prepared by culturing the labeling cells only and the control for maximum release was made by adding lysis buffer (kit provided) to the labeling cells.

[0242] ELISA, ELISPOT Assays and Western Blot.

[0243] For cytokine secretion, RCC cell lines sk-rc-52 (CAIX+) or sk-rc-59 (CAIX−) were seeded overnight at 1×10⁶ per well in a 24-well plate, followed by 1×10⁶ untransduced or transduced T cells. Before co-culture with tumor cells, T cells were washed with PBS twice to remove human IL-2. After overnight incubation, the supernatant was harvested and analyzed for IL-2 and IFN-γ by ELISA (e-Bioscience). In detecting T cells for the IFN-γ ELISPOT assay (e-Bioscience), a membrane was developed using AEC substrate solution and the number of spots was counted by ELISPOT plate reader (C.T.L. Cellular Technology).

[0244] For Western blot, preparation of untransduced and transduced T cells was described⁵⁰. One million cells were prepared in non-reducing and reducing buffer (0.1 M dithiothreitol) and run on a 10-20% polyacrylamide gradient gel (Invitrogen). Proteins were transferred to polyvinylidence fluoride transfer membrane (NEN Life Science Products, Boston, Mass.) at 100 V, 4° C. overnight. The membrane was incubated with 1:2000 primary antibody, anti-human ζ-chain monoclonal antibody 8D3 (BD Pharmingen, San Diego, Calif.) and then with 1:3000 secondary antibody horseradish peroxidase (Caltag). Immunodetection was performed using the ECL Plus Western blotting detection system (GE Healthcare, Piscataway, N.J.) and x-ray film exposure.

[0245] Detection of IgG Secreted by CART Cells Using ELISA.

[0246] The total level of IgG secreted to the medium of transduced cells was detected using Human IgG ELISA Quantitation Set (Bethyl Laboratories). The Anti-PD-L1 Abs secreted by transduced CD8+ CART Cells were purified with Protein A sepharose beads (GE Healthcare) and biotinylated using the EZ-Link Sulfo-NHS-LC-Biotin (Thermo Scientific). These antibodies were incubated with 5 μg/mL of human PD-L1 produced in the lab, which was pre-immobilized in MaxiSorp plates (Nunc) by 2 hours, RT. The biotinylated antibodies were detected by incubation with streptavidin-HRP for 1 h and developed with SureBlue™ TMB Peroxidase Substrate and TMB Stop Solution (KPL). The absorbance was read at λ=450 nm.

[0247] Proliferation, Clonal Expansion and Cytokine Secretion after Tumor Cell Contact.

[0248] Tumor cells were irradiated (3,000 rads) and seeded at 2.5×10⁵ per well. T cells were added at 1×10⁶ in culture medium containing R-10 plus 100 IU/ml human IL-2 for a week culture. T cells were split to maintain suitable density and re-stimulated with tumor cells weekly. The number of T cells was counted every 3 or 4 days for 2 weeks. The percentage expression of ZsGreen by transduced T cells and T cell subsets were determined weekly by fluorescence-activated cell sorting (FACS). For cytokine secretion studies after tumor cell contact, T cells that were in contact with irradiated tumor cells for one or two weeks were washed, incubated with fresh tumor cells overnight and culture supernatants were collected after 24 hrs for analysis.

[0249] Clonal Expansion of CAIX+ CART Cells.

[0250] In one embodiment, Skrc52 CAIX+/PD-L1− and Skrc52 CAIX−/PD-L1− cells were irradiated with 3,000 rads and seeded at 2.5×10⁵ per well. 1×10⁶ T cells were added at the culture medium containing 50 IU/ml human IL-21 every two days. T cells were split to maintain suitable density and re-stimulated with tumor cells weekly. T cell number was counted once a week for 3 weeks by FACS.

[0251] Effect of Anti-CAIX CART Cells Secreting Anti-PD-L1 Antibodies on RCC Cells Viability and Antibody-Dependent Cellular Cytotoxicity (ADCC).

[0252] 2.5×103 Skrc59 CAIX+/PD-L1+ and Skrc52 CAIX−/PD-L1− were plated in 96 wells plate ON. Four days after the CART cells transduction they were added to the RCC cells in the 25:1, 50:1 and 100:1 ratio Effector cells: Tumor cells (E:T) and incubated ON. CART cells were removed and the viability of the tumor cells was assayed for MTT (Life Technologies). For the ADCC assay RCC cells were incubated for 1 hour, 37° C. with 50 μL of the CART cells supernatant adjusted for 500 ng/mL of the respective Ab Anti-PD-L1 IgG1, Anti-PD-L1 IgG4 or Anti-SARS IgG1. The cells were then incubated with 12.5:1, 25:1 or 50:1 NK cells for 4 h, 37° C., Lactate dehydrogenase (LDH) was measured in the supernatant by CytoTox 96® Non-Radioactive Cytotoxicity Assay (Promega).

[0253] ELISA Assays to Detect IL-2 and IFNγ Released by Functional CART Cells.

[0254] For analysis of cytokine secretion, 2.5×103 RCC cells Skrc59 CAIX+/PD-L1+ or Skrc52 CAIX−/PD-L1− were seeded in 96 wells plates ON, followed by 5:1, 25:1 and 50:1 CAR transduced T cells addition and incubation ON. The supernatant was removed and analyzed for IL-2 and IFNγ secretion using the Human IFNγ or Human IL-2 ELISA Ready-SET-Go Kit (eBioscience).

[0255] Orthotopic Renal Cell Carcinoma Model Establishment and CART-Cells Therapy.

[0256] 5×10⁴ passaged Skrc59 CAIX+/PD-L1+ cells were suspended in 10 μL of culture medium and diluted 1:1 in Matrigel (Life Technologies) and injected into the left subrenal capsule of 6-8 week-old male NSG mice (N=35). After a week, tumor implantation was confirmed by bioluminescence (BLI) image using a Xenogen IVIS imaging system (Life Technologies) and 1.0×107 of each CART cell (anti-BCMA CAR/anti-SARS IgG1, anti-CAIX CAR/anti SARS IgG1, anti-CAIX CAR/anti-PD-L1 IgG1 and anti-CAIX CAR/anti-PD-L1 IgG4) or untransduced T cells were injected intravenously in the tail vein (Day 0); N=6 mice per group. The tumor BLI was quantified after 7, 14, 23 and 30 days of CART cells injection. A second injection of 2.5×10⁶ CAR or untransduced T cells was made on day 17. Mice were sacrificed at 30 days post tumor engraftment by standard CO2 inhalation, and tumors were harvested and weighted. The kidney tumors from all mice were divided in two equal parts and one of them was fragmented in small pieces and digested with collagenase 0.5 U/mL and DNAse 1.0 mg/mL to TIL extraction, which were analyzed for the expression of the exhaustion markers and the percentage of CART cells by FACS. The other part was fixed in 10% buffered formaldehyde, and submitted to immunohistochemistry for different markers. Two mice of each group were injected with 4.5×106 NK cells 2 days before the euthanasia. NK cells present in the tumor were stained with APC-Anti-CD56 Ab and analyzed by FACS. Animal experiments were performed in accordance with the guidelines of the DFCI Animal Care Committee.

[0257] Tumor Establishment and T Cell Therapy.

[0258] In one embodiment, due to immune-rejection of sk-rc-52 in 6-8 week-old female BALB/c nude mice and to accelerate in vivo growth properties, five million cells were subcutaneously inoculated into the mice, harvested, and expanded in vitro. The cell line was then passaged two more times in nude mice and the passaged cells were expanded for further experiments (subclone 4-1). For the therapeutic experiments, 5 million sk-rc-59 and 7.5 million passaged sk-rc-52 cells were subcutaneously inoculated on opposing flanks into nude mice to yield comparable tumor growth rates. After 7 days, tumors grew to the size of ˜6 mm, and 50 million nontransduced or transduced T cells were injected intravenously. The mice were also treated with 20,000 IU human IL-2 by peritoneal injection every two days. Tumor size was measured by caliper in two dimensions and the mean of two tumor diameter was reported here. Animal experiments were performed in accordance with the guidelines of the Dana Farber Cancer Institute Animal Care Committee. Mice were sacrificed when tumors reached 15-mm diameter or 2,000 mm³ and tumors were harvested.

[0259] Immunohistochemistry and Immunofluorescence Staining.

[0260] For in vitro examination of transduced T cells, the cultured T cells were washed twice using PBS and resupended in 2 μM Far Red DDAO-SE CellTrace dye (Molecular Probe) in PBS for 15 minutes at 37° C. Then the cells were washed with culture medium twice and cytospun on the glass slide. Far red pre-stained CART cells with ZsGreen coexpression were visualized using confocal microscopy (Zeiss) at the Optical Imaging Core facility, Harvard NeuroDiscovery Center.

[0261] To examine the killing effect of transduced T cells in tumor bed in situ, tumors were prepared for frozen sections for ApopTag Peroxidase In Situ Apoptosis Detection kit (Millipore). Cryosections were incubated with TdT enzyme (Millipore) for 1 hour. Rabbit anti-DIG (Dako) was added and incubated for 30 minutes and then Cy3-conjugated anti-rabbit antibody (Invitrogen) was added and incubated for 30 minutes. Sections were mounted with DAPI antifade mounting medium and fluorescent images were examined using confocal microscopy.

[0262] Xenograft tumors and mouse spleens were harvested, fixed in 10% formalin/PBS solution, and submitted to the Harvard Medical School, Rodent Histopathology Core Facility. Paraffin-embedded sections were dewaxed with xylene and rehydrated through graded alcohols before staining. Immunohistochemistry staining was performed by incubating with anti-human granzyme B antibody (Dako, clone GrB-7 (1:200)) as a primary antibody for 1 hour followed by secondary anti-rabbit antibody (Pierce) or anti-mouse antibody (Dako) for 30 minutes. Sections were developed using DAB substrate and counterstained with hematoxylin.

[0263] In one embodiment, the fixed tumors were paraffin-embedded, sectioned at four-micrometer, placed on slides and prepared for IHQ. The tissues were stained with the anti human: Ki67 (Vector, VP-K451), PD-L1 (Clone 405.9A11, produced in Dr. Gordon Freeman's lab), granzyme B (Abcam, ab4059) or NCAM (CD56) (Abcam, ab133345) antibodies, followed by secondary HRP conjugated anti-rabbit Ab or HRP-Avidin. The slides were developed using DAB and counterstained with hematoxylin. The images were obtained in an Olympus BX51 microscopy using a DP71 digital camera (Olympus) and analyzed in the DP Controller Software (Olympus). The image quantification was performed using the IHC Profiler Plugin of ImageJ Software as described in Varghese F, Bukhari A B, Malhotra R, De A. IHC Profiler: an open source plugin for the quantitative evaluation and automated scoring of immunohistochemistry images of human tissue samples. PloS one. 2014; 9:e96801.

[0264] Statistical Analyses.

[0265] Statistical significance was determined using the two-tailed Student's t-test.

[0266] The statistical analysis associated with FIGS. 16-23 are representative of at least three experiments unless otherwise noted. The statistical significance of the data was evaluated using ANOVA and Tukey posttest. P<0.05 was considered significant. The statistical analysis was performed using the IBM SPSS Statistics software version 20.

### Example 2: ADCC Mediated Killing of Anti-Cam Antibodies and Choice of Car Targeting Moiety

[0267] We have previously reported on a panel of high affinity human anti-CAIX antibodies that differed in their epitope mapping, expression levels and ability to internalize CAIX²³. Our first aim was to investigate the anti-tumor activity of five of these anti-CAIX single-chain antibodies as candidates for CAR construction. To test for anti-CAIX mAb mediated ADCC, the scFvs were converted to scFv-Fc (hIgG1) minibodies²³. We found that all scFv-Fcs exhibited antigen-specific tumor lysis. For tumor cell line sk-rc-09 with high CAIX+ expression, specific lysis ranged from 40-57% and for sk-rc-52 with moderate CAIX+ expression, specific lysis ranged from 46-60%, with background of lysis of <5% for the CAIX− tumor cell line sk-rc-59. For negative control scFv-Fcs such as anti-CXCR4 48-Fc²³ and anti-SARS 11A-Fc²⁴, only background levels of cell lysis were seen (FIG. 1). Based on ADCC killing and other published analyses, scFvG36 was chosen for further evaluation as the CAR targeting moiety.

[0268] Construction and Expression of CAIX-Specific Chimeric Receptors.

[0269] Two generations of anti-CAIX CARs were constructed: 1^{st} generation G36 CD8 CAR, with scFvG36 linked to CD8, truncated extracellular, hinge, and transmembrane domains plus signaling domain of TCRζ (G36-CD8z). To deliver costimulatory signals, 2^{nd} generation CD28 CAR was generated, consisting of scFvG36 fused to truncated extracellular, transmembrane and intracellular domains of CD28 plus signaling domain of TCRζ (G36-CD28z) (FIG. 2A). Irrelevant 2^{nd} generation CD28 CAR was made by using anti-HIV CCRS (clone A8) scFv instead²⁵. In order to detect the expression of these constructs, human rhodopsin C9 tag were inserted between the scFv and CD8 or CD28 domains, respectively and ZsGreen was expressed after the IRES sequence. High concentrations of viral stocks were obtained at comparable levels among the different constructs that were tested by cotransfection of vector plasmids into 293T cells (data not shown).

[0270] For transduction, PHA mitogen was used to stimulate peripheral blood lymphocytes for 3 days. Concentrated lentivirus supernatants were used to infect human primary T cells in the presence of cationic reagent DEAE as it increased the transduction rate of 1.5-2× fold as compared with polybrene (data not shown). The transduction rate of primary T cells ranged from 17% to 45% by ZsGreen expression in FACS analysis. A representative experiment showing ZsGreen expression in circa 25% by primary CART cells following lentivirus transduction is shown in FIG. 2B, left column CAIX-Fc fusion protein can bind to the G36-CD8z and -CD28z CART cells but not to control A8-CD28z CART cells (FIG. 2B, middle column). C9-tag expression was only detected at circa one-third the level of the CAIX-Fc protein (FIG. 2B, right column) which is likely related to the finding that mAb 1D4 preferentially recognizes the rhodopsin nonapeptide C9 when presented as a carboxy-terminal verses internal polypeptide sequence (data not shown). Transduced cells that were cultured in vitro for 6 weeks maintained their expression of ZsGreen.

[0271] On Western blot under reducing conditions, G36 and A8 CD28z CARs migrated with a mol wt of circa 53 kD whereas endogenous TCRζ was 16 kDa. G36-CD8z CAR migrated with a mol wt of circa 48 kD. Under nonreducing conditions, these two CD28z CARs formed homodimers (FIG. 2C, data of CD8z CAR not shown).

### Example 3: Enhanced Cytokine Secretion by Transduced T Cells on Contact with CAIX+ Tumor

[0272] A study was performed to compare the reported superior effects of using 2^{nd} generation G36-CD28z CART cells that incorporate signaling components of the costimulatory molecule CD28 to bypass MHC presentation and enhance T cell effector functions verses 1^{st} generation G36-CD8z CART cells. As seen in FIG. 3A, after incubation with CAIX+ sk-rc-52 cells overnight, only low levels of type I cytokines IL-2, IFNγ and IL-17 secretion were seen with control A8 CD28z CART cells or LAK cells alone. In contrast, both 1^{st} and 2^{nd} generation G36 expressing CART cells showed elevated levels of cytokine secretion with 2^{nd} generation G36-CD28z CART cells secreting higher amounts of type I cytokines which reflects their higher activation status compared to 1^{st} generation G36-CD8z CART cells. Specifically, G36-CD28z CART cells secreted 6.5×, 2.3× and 4× more IL-2, IFNγ and IL-17, respectively than G36-CD8z CART cells. Specificity of cytokine secretion induction by the two G36 CART cells is seen by their minimal stimulation with CAIX− sk-rc-59 cells.

[0273] In an Elispot study, after interaction with CAIX+ sk-rc-52 tumors, G36-CD28z CART cells became high capacity IFN-γ producing cells (FIG. 3B). G36-CD28z CART cells produced 6 times more spots than seen for G36-CD8z CART cells upon interaction with CAIX+ sk-rc 52 tumor cells and 12 times more spots than seen after interaction with CAIX− sk-rc-59 tumor cells. Similarly, G36-CD28z CART cells had a higher amount of granzyme B-secreting spots after contact with CAIX+ tumors as compared with G36-CD8z CART cells and control T cells. PMA and ionomycin stimulated T cells yielded the highest amount of IFN-γ and granzyme B secreting T cells. These studies demonstrate both specificity and high capacity of G36-CD28z CART cells to be activated by contact with CAIX+ tumor cells.

### Example 4: Specific Cytotoxicity Via Car Signaling in Transduced T Cells

[0274] An in vitro cytotoxicity assay was established to further evaluate the killing activity of the different G36 CART cells. Using different ratios of effector-to-target, G36-CD28z CART cells and its' twice in vivo passaged subclone 4-1 exhibited the highest amount of cytolysis of CAIX+ tumor sk-rc-52 (FIG. 3C). With high ratio of more than 25:1, G36-CD28z CART cells showed 2-3 fold higher cytotoxicity than G36-CD8z CART cells and with low ratio of 5:1, G36-CD28z CART cells showed 8-9 fold higher lysis than G36-CD8z CART cells. However, G36-CD8z CART cells still exhibited good cytotoxicity with up to more than 60% tumor lysis using 100:1 of E:T ratio. Irrelevant A8-CD28z CART cells and control T cell LAK showed the background non-specific tumor lysis with around 20% lysis when using the highest 100:1 of E:T ratio. In all cases of using CAIX− tumor sk-rc-59, transduced and untransduced T cells showed background lysis.

### Example 5: Improved In Vitro Proliferation in Cart Cells with Prolonged Caix+ Tumor

[0275] Besides enhanced cytokine secretion and cytotoxicity on short term CAIX+ tumor cell contact, incorporation of the CD28 costimulatory molecule into the CAR construct demonstrated improved proliferation upon prolonged contact with antigen-specific tumor cells. Untransduced and transduced (around 20%) T cells were mixed with freshly irradiated tumor cells weekly in the presence of 100 units/ml human IL-2. To test the different levels of antigen stimulation to a fixed amount of T cells, we used tumor cell to T cell ratios of 1:8, 1:4 and 1:2. T cell numbers were counted by trypan exclusion and CART cell fractions were examined by flow cytometry. Under culture with CAIX− sk-rc-59 tumor cells, the number of transduced and untransduced T cells was maintained (FIG. 4A bottom). The lack of basal level of proliferation of control T cells might be due to the high amount of suppressive cytokines secreted by the tumor cell line. In contrast, after two weeks of culture with CAIX+ sk-rc-52 tumor cells, at ratio 1:8, the population of G36-CD28z CART cells increased to 30-fold and G36-CD8z CART cells proliferated up to 17-fold whereas at a ratio of 1:4, the number of G36-CD28z CART cells increased 19-fold and G36-CD8z CART cells proliferated 4-fold. With higher amounts of tumor cells, neither G36-CD28z or G36-CD8z CART cells could proliferate. Irrelevant A8-CD28z CART cells and control T cell LAK showed no proliferation with tumor cells (FIG. 4A top).

[0276] Proliferating T cells were also harvested to examine their enrichment on CAIX+ tumor cell contact. On CAIX− tumor contact, there was no change in the percentage of any CART cells within the population. However on contact with CAIX+ sk-rc-52 tumor cells, there was enrichment in both populations of G36 CART cells. For G36-CD28z CART cells, the positive population was enriched from 18% on day 0 to 52% on day 8 to 88% on day 16. Expression of G36-CD8z CART cells was enriched from 19% on day 0 (same levels at T cells only) to 32% on day 8, and to 72% on day 16. No expansion of A8-CD28z CART cells was seen over the two week study (FIG. 4B). The percentage of CD8 cells remained constant throughout the 16 day study under all conditions (FIG. 4C).

### Example 6: Persistent Effector Function of Cart Cells after Re-Contact with Tumor

[0277] Transduced T cells that were in contact with irradiated tumor cells for one or two weeks were also tested for cytokine secretion after 24 hours of contact with fresh non-irradiated tumor cells. Upon contact with CAIX+ tumor (sk-rc-52) for one or two weeks, G36-CD28z and G36-CD8z CART cells showed similar IFN-γ secretion levels although costimulatory signaling through G36-CD28z CAR yielding 2× to 2.5× more IFN-γ secretion than seen for G36-CD8z CAR (Table 1). For IL-2 secretion, two weeks of tumor contact for G36-CD28z and G36-CD8z CART cells exhibited more IL-2 secretion than one week of contact. G36-CD28z CART cells yielding 5× more IL2 than G36-CD8z CART cell on one week of contact and 2.5× more on contact for two weeks. In addition, G36-CD28z CART cells in contact with tumor cells for two weeks secreted 3.3× more IL-2 than one time tumor contact whereas G36-CD8z CART gave 6.8× more IL-2 secretion after two weeks compared to after one week of tumor contact. These results indicate that the transduced CART cells did not become exhausted and maintained functional activity after a second tumor stimulation. Only background levels of INF-γ and IL-2 secretion were seen with A8-CD28z, LAK and G36 CART cell treatments on contact with CAIX− sk-rc59 cells.

### Example 7: Suppression of Established Tumor by Cart Cells

[0278] We next tested CART cells to inhibit established tumor cell growth in nude mice that were inoculated with sk-rc-52 tumor cells on left flank and sk-rc-59 tumor cells on right flank that had been established to yield similar tumor curves. On day 7 after tumor implantation, with typical tumor size of ˜6×6 mm, 50 million G36-CD28z CART cells, A8-CD28z CART cell or untransduced T cells (LAK) were injected intravenously. Adoptive T-cell therapy was performed in two separate experiments with group sizes of n=7 in the first trial and n=8 in the second trial, in the presence of high dose IL-2 (2×10⁵ IU) via intraperitoneal injection. No T-cell treatment was included in order to compare the growth of tumor and the effect of cell-therapy.

[0279] In trial one, treated and untreated CAIX− sk-rc-59 tumors had average size of 6.09±0.02 mm on day 4 and 9.29±0.12 mm on day 25 (within four tested groups). They exhibited the same tumor growth rate in control groups and T-cell treated groups. Untreated CAIX+ tumors that received no T cells showed similar tumor size as CAIX− tumors, with an average size of 6.09±0.13 mm on day 4 and 9.15±0.11 mm on day 25. However, the tumor size of G36-CD28z CART cell treated mice showed statistically significant reduction in size compared to no T-cell treated mice at every time point that was examined over the 25 day study (FIG. 5). G36-CD28z CART treatment also led to a greater reduction in tumor size than seen with A8-CD28z CART cell and LAK treated mice on day 7 (p<0.05) and on day 25 (p<0.001), as calculated by two-tailed t test. In trial two, tumor size of G36-CD28z CART cell treated mice was significant smaller than that of no T-cell treated mice through the 29 day experiment. G36-CD28z CART cell treated mice also had smaller tumors than were seen with A8 CD28z CART cell and LAK treated mice on day 8 to day 26 with p<0.01 and on day 29 with p<0.001 (FIG. 5).

[0280] Partial regression of CAIX+ tumor was considered when the tumor size was smaller than 30% volume of control CAIX− tumor in a same mouse receiving the same T-cell. Partial tumor regression was observed in a high percentage of cases using G36-CD28z CART cells (10 out of 15, (67%)), but only infrequently in irrelevant target A8-CD28z CART cells (1 out of 15, (7%)) and in activated T cell LAKs (2 out of 15, (13%)) (Table 2). Frequency of partial regression response was found to be statistically significant for mice treated with G36-CD28z CART cells versus control A8-CD28z CART cells and LAKs at p<0.001 and p<0.005, respectively by Fisher test.

### Example 8: In Situ Cytotoxicity by Cart Cells

[0281] A sample of the whole population of transduced T cells used for the in vivo study were pre-stained with Far red dye and the CART cells expressing ZsGreen protein within the population were analyzed by confocal microscopy. These results demonstrated circa 30% transduction efficiency which is in agreement with our FACS analysis (FIG. 6A).

[0282] To provide evidence that G36-CD28z CART cell treatment of CAIX+ sk-rc-52 tumor cells in vivo resulted in killing by apoptosis, tumor sections were stained by Tunnel assay. On day 3 after adoptive T cell treatment, Tunnel staining identified apoptotic tumor cells (red) at the edge of tumor (FIG. 6B upper row) and inside the tumor bed (FIG. 6B middle row). The apoptoic tumor cells lost the DAPI nuclear staining. Shown in the enlarged graph (FIG. 6B bottom row) is a ZsGreen expressing CART cell interacting with two tumor cells that were going apoptosis.

[0283] Due to the limitation of fluorescent signal, ZsGreen expressing CART cells could not be observed from the whole tissue section. Therefore on day 3 after G36-CD28z CART cell or LAK treatment, the tumors were harvested and sections were also stained with granzyme B antibody to locate the activated T cells. In FIG. 6C, the dark brown areas of staining show granzyme B+ T cells that are seen infiltrating into the CAIX+ sk-rc-52 tumor sections (FIG. 6C upper left). These granzyme B+ T cells were seen surrounding the tumor (FIG. 6C upper left (a) and middle) and inside the tumor (FIG. 6C upper left (b) and lower). Tumors with necrotic areas were shown in H&E stained slides (labeled as n inside FIG. 6C right middle and lower) and lie at locations near to the granzyme B+ T cells. In contrast, the CAIX+ sk-rc-52 tumors treated with control activated T cells (LAK) (FIG. 7) did not show any granzyme B+ T cells. Similarly, CAIX− sk-rc-59 treated with G36-CD28z CART cells (FIG. 8) or treated with LAK (FIG. 9) showed a low background staining while tumor was proliferating. For positive control of granzyme B staining, CART cells was locally injected into the established sk-rc-52 tumor in mice. After one day, the mice was sacrificed and tumor tissue was sectioned for this staining (FIG. 10).

TABLE 1
Cytokine Secretion After One or Two
Weeks of Contact with Tumor Cells*

| | IFN-γ (pg/ml) | | IL-2 (pg/ml) | |
|---|---|---|---|---|
| CART cells | One week | Two weeks | One week | Two weeks |

RC-SK-52 (CAIX+) Cells

| | | | | |
|---|---|---|---|---|
| G36-CD28z | 25,788 | 28,192 | 7,524 | 24,937 |
| G36-CD8z | 13,096 | 10,961 | 1,470 | 10,029 |
| A8-CD28z | 55 | 55 | 9 | 13 |
| LAK | 68 | 58 | 9 | 13 |

RC-SK-59 (CAIX−) Cells

| | | | | |
|---|---|---|---|---|
| G36-CD28z | 31 | 29 | 5 | 4 |
| G36-CD8z | 27 | 38 | 8 | 10 |
| A8CD28z | 56 | 55 | 7 | 8 |
| LAK | 49 | 56 | 10 | 8 |

*Transduced T cells were incubated with irradiated tumor cells for one or two weeks then harvested, washed and incubated with fresh non-irradiated tumor cells overnight and supernatants collected after 24 hrs for cytokine analysis. For T cell cultures that did not interact with tumor cells, only background level of cytokines were detected at levels <50 pg/ml IFN-γ and <10 pg/ml IL-2.

TABLE 2
Frequency of Partial Regression of
CAIX+ Tumors by G36-CD28z CART cells

| Gene construct | LAK | A8-CD28z | G36-CD28z | Statistics |
|---|---|---|---|---|
| Target antigen | none | irrelevant | specific | |
| Co-stimulatory | none | 2 signals | 2 signals | |
| Partial | 2 | 1 | 10 | p < 0.005*; |
| response | | | | p > 0.001** |
| Non-partial | 13 | 14 | 5 | N.S. |
| response | | | | |

Mice from experiments reported in FIG. 5 (experiment 1, n = 7 & experiment 2, n = 8) were scored for response at day 10. Partial response is defined as the regression of tumor to smaller than 30% volume of control tumor (same T-cell treatment in the same mouse bearing left flank of sk-rc-52 and right flank of control tumor sk-rc-59).
Fisher test results -
*G36-CD28z verses LAK;
**G36-CD28z verses A8-CD28z;
N.S.—no statistically significant relationship between number of tumors and partial response between T cells transduced with LAK and with A8-CD28z.

### Example 9: Anti-Carbonic Anhydrase IX Chimeric Antigen Receptor T Cells Releasing Anti-PD-L1 Antibodies Revert T Cell Exhaustion and Regress Renal Cell Carcinoma in a Humanized Mouse Model

[0284] Characterization of Anti-CAIX CAR T Cells Secreting Anti-PDL1 IgG1 or IgG4

[0285] In order to develop a new CAR therapy for CAIX+ RCC, we engineered a bicistronic lentiviral vector to express the anti-CAIX (G36) scFv linked to CD28 and CD3-signaling domains (G36-CD28z CAR in the first cassette and anti-PD-L1 IgG1 or IgG4 in a second expression cassette after an IRES site (FIG. 16A). The anti-PD-L1 IgG sequence was inserted into the lentiviral vector with the aim to block T-cell exhaustion, which we propose may improve the efficacy of G36-CD28z CART cells (FIG. 16B). As controls, we used an anti-CAIX CAR or anti-BCMA CAR containing an irrelevant anti-SARS IgG1 mAb in the second cassette. The lentiviruses generated from these constructs were transduced into CD8 T cells and cultivated in the presence of IL-21, which yielded CART cells with modestly improved proliferation than was seen with IL-2 (FIGS. 21A and 21B), while maintaining the same specific killing activity for CAIX+ RCC (FIGS. 21C and 21D). The percentage of CAIX and PD-L1 expression in all RCC lineages used in our experiments is shown in the FIG. 22.

[0286] The CART cell functionality is demonstrated in FIG. 23, where CD8 T cells transduced with all CARS were able to proliferate in the presence of IL-21 and anti-CD8/CD28 beads (FIGS. 23A and 23B), achieving transduction levels of 65-90% after four days (FIG. 23C). Fourteen days after transduction, we evaluated the stable long-term expression of CAR by the integrated lentiviruses (FIG. 16C), which was maintained around 25-50% for all CARs. Total IgG levels secreted by CD8 T cells was also determined, ranging around 300-650 ng/mL after 4 days (FIG. 16D). The binding specificity of the anti-PD-L1 IgG1 and IgG4 antibodies for human PD-L1 was also confirmed (FIG. 16E). The levels of biotinylated anti-PDL1 IgG1 and 4 were significantly lower than total IgG, which could be explained by the fact that a portion of the IgG was wasted during the purification process. The ability of anti-CAIX CART cells to undergo clonal expansion in the presence of CAIX+ RCC cells was established (FIGS. 16F and 16G). Anti-CAIX CART cells cannot expand significantly in the presence of CAIX− RCC cells.

[0287] Effector Activity of Anti-CAIX CART Cells.

[0288] All anti-CAIX CART cells were able to induce around 50-70% decrease in the viability of Skrc59 CAIX+/PD-L1+, indicating that the Anti-PD-L1 IgG1 and IgG4, secreted by some CART cells, did not augment cell death under these assay conditions (FIG. 17A). Anti-CAIX CART cells induced IL-2 and IFNγ release in the presence of CAIX+/PD-L1+ cells, indicating the specific activation of anti-CAIX CART cells (FIGS. 17C and 17E, respectively). Regarding the anti-CAIX CART cells secreting anti-PD-L1 IgGs, the unique differential effect was seen for the IgG1 isoform, which was able to induce around 60% of ADCC in CAIX+/PD-L1+ RCC cells when incubated with natural killer cells (NK) (FIG. 17G). No effect in cell viability, cytokines secretion or ADCC was detected for any of the CART cells in the presence of CAIX−/PD-L1− cells (FIGS. 17B, 17D, 17F and 17H).

[0289] Anti-CAIX CART Cells-Secreting Anti-PD-L1 Antibodies can Diminish T Cell Exhaustion In Vitro.

[0290] A circa 50% decrease in the exhaustion markers Lag-3, Tim3 and PD-1 was found in the anti-PD-L1 IgG1 and IgG4 anti-CAIX CART groups (FIGS. 18A, 18B and 18C, respectively) after induction of exhaustion compared to the parental anti-CAIX or irrelevant anti-BCMA CART cells. At this point, the killing activity of anti-CAIX CART cells without anti-PD-L1 was retested over Skrc59 CAIX+/PD-L1+ cells. As can be seen in FIG. 18D, the anti-CAIX CART cells had lost their killing activity against CAIX+/PD-L1+ RCC in vitro to a level that was similar to the irrelavent CAR group, establishing that the anti-CAIX CART cells became anergic. In contract, the RCC viability diminished 25-50% for the anti-CAIX CAR anti-PD-L1 IgG1 and IgG4 CART groups, thereby providing evidence that the checkpoint blockade elicited by the presence of secreted anti-PD-L1 IgGs can lead to diminished T cell exhaustion.

[0291] Anti-CAIX CART Cells Secreting Anti-PD-L1 Antibodies can Further Decrease Tumor Growth in an Orthotopic Mouse Model of Human RCC.

[0292] NSG mice were used to establish an orthotopic RCC model by injecting Skrc-59 CAIX+PD-L1+luciferase+ positive RCC cells under the kidney capsule followed by i.v. injection of 1.0×107 CART or untransduced T cells (Day 0) and repeat treatment on Day 17 with a lower dose (2.5×10⁶) of the same cells. We did not treat the mice with systemic IL-2 to maintain the proliferation of CART cells to avoid the bias that this molecule could exert over the tumor growth. The data in FIGS. 19A-19C demonstrate that all three anti-CAIX CART cell groups showed decreased RCC growth compared to irrelevant anti-BCMA CART cells or untransduced cells over the course of the experiment with the marked anti-tumor effects of the anti-CAEX CART cells secreting anti-PD-L1 IgG1 or IgG4 becoming evident at day 23 and 30 (FIGS. 19A and 19B). However, even one week after i.v. treatment with CART cells, we observed that the tumors were 2-3 times smaller in the anti-PD-L1-secreting CART cells when compared with parental anti-CAIX CART cells and the two control groups (FIG. 24A). We also analyzed CD45+ T cell survival in the mouse blood to gauge their survival in this passive transfer model. At Day 8 we observed that the amount of human T cells within the PBMCs was only 10-15% (FIG. 24B) and for this reason we decided to expand the CART cells in vitro to perform a second injection into the mail blood at Day 17. One week after the second injection (Day 23) the anti-PD-L1 IgG1 and IgG4 groups had tumors 15 times smaller than the control groups and 5 times smaller than the anti-CAIX CAR T cells without anti-PD-L1 secretion (FIG. 19C and FIG. 24A). At day 30, the group of mice treated with CART cells-secreting anti-PD-L1 antibody had tumors 5 times smaller than the control groups (FIG. 19C and FIG. 24A). The excised tumors weights were also lower from the mice treated CART cells-secreting anti-PD-L1 antibody and that was particularly evident for the anti-PDLL IgG4 antibody group (FIGS. 19B and 19D).

[0293] Analysis of CART Cell Tumor Infiltrates and Evidence that Anti-CAIX CART Cells Secreting Anti-PD-L1 Antibodies can Lead to Reversal of T Cell Exhaustion.

[0294] Analysis in the excised tumors showed around 10% of TIL in all groups (FIG. 24C)

[0295] One of the most important effects observed with the anti-CAIX CART cells secreting anti-PD-L1 IgG1 or IgG4 antibodies in vivo was their ability to decrease the expression of the exhaustion markers PD-1, Tim-3 and Lag-3. As shown in FIG. 20A, we observed a circa 40-50% decrease in the expression of these markers in the TIL's when compared with the treatment using untransduced control cells at the Day 30 There was also a circa 30-70% decrease compared to anti-CAIX CAR cells That were not secreting anti-PDL-1 antibodies thereby providing evidence that the locally secreted antibodies had an effect on decreasing T cell exhaustion.

[0296] The effector activity of CART cells and their influence over RCC proliferation in vivo was evaluated by the immunohistochemical detection of granzyme B in the TIL, the tumor proliferation marker Ki67 and the tumor immunosuppressive protein PD-L1 (FIGS. 20B and 20C). The granzyme B staining showed the effector activity of CD8+ cells, especially in the RCC tumors treated with the anti-CAIX CART cells secreting anti-PD-L1 IgG4, which presented an augmented percentage of high positive stained cells (FIGS. 20B and 20C). PD-L1 expression decreased dramatically in the tumors treated with Antianti-CAIX CART cells, being more expressive in the Anti-CAIX/Anti-PD-L1 IgG-secreting groups (FIGS. 20B and 20C). Ki67 expression decreased significantly in the Anti-CAIX/Anti-PD-L1 IgG-secreting groups, as we can visualize in the total DAB pixel count graph, however when the intensity among the positive nuclei staining (Ki67 IHC quantification graph) was evaluated, we can note that the Anti-CAIX/Anti-PD-L1 IgG4 presented the lowest intensity of Ki67 expression (FIGS. 20B and 20C). For the quantification of nuclear proteins, like Ki67, DAB staining pattern is confined to the nuclei, and the threshold feature of ImageJ should be used to select the positive stained areas for quantification. For this reason, there are no negative cells in the Ki67 IHC quantification graph (FIG. 20C) and DAB pixel count were also shown for evaluation of total Ki67 staining, including negative cells (FIG. 20C).

[0297] Anti-CAIX CART Cells Secreting Anti-PD-L1 IgG1 Antibodies can Recruit NK Cells to the Tumor.

[0298] The tumors of the mice treated with Anti-CAIX/Anti-PD-L1 IgG1 that received an injection of NK cells 2 days before the euthanasia showed the presence of 40% more NK cells inside the tumor, when compared with Anti-BCMA/Anti-SARS IgG1, as detected by Anti-CD56 staining by FACS (FIG. 25A). The increase in NK cells in the Anti-CAIX/Anti-PD-L1 IgG1 group was also detected and quantified by IHC (FIG. 25B). Very few NK cells were also detected in the groups treated with CART cells secreting an unspecific IgG1 Ab.

### Other Embodiments

[0299] While the invention has been described in conjunction with the detailed description thereof, the foregoing description is intended to illustrate and not limit the scope of the invention, which is defined by the scope of the appended claims. Other aspects, advantages, and modifications are within the scope of the following claims.

### REFERENCES

[0300] 1. Ivanov S, Liao S Y, Ivanova A, Danilkovitch-Miagkova A, Tarasova N, Weirich G et al. Expression of hypoxia-inducible cell-surface transmembrane carbonic anhydrases in human cancer. Am J Pathol 2001; 158(3): 905-19.
[0301] 2. Loncaster J A, Harris A L, Davidson S E, Logue J P, Hunter R D, Wycoff C C et al. Carbonic anhydrase (CA IX) expression, a potential new intrinsic marker of hypoxia: correlations with tumor oxygen measurements and prognosis in locally advanced carcinoma of the cervix. Cancer research 2001; 61(17): 6394-9.
[0302] 3. Hilvo M, Baranauskiene L, Salzano A M, Scaloni A, Matulis D, Innocenti A et al. Biochemical characterization of CA IX, one of the most active carbonic anhydrase isozymes. J Biol Chem 2008; 283(41): 27799-809.
[0303] 4. Oosterwijk E, Ruiter D J, Hoedemaeker P J, Pauwels E K, Jonas U, Zwartendijk J et al. Monoclonal antibody G 250 recognizes a determinant present in renal-cell carcinoma and absent from normal kidney. International journal of cancer. Journal international du cancer 1986; 38(4): 489-94.
[0304] 5. Liao S Y, Brewer C, Zavada J, Pastorek J, Pastorekova S, Manetta A et al. Identification of the MN antigen as a diagnostic biomarker of cervical intraepithelial squamous and glandular neoplasia and cervical carcinomas. Am J Pathol 1994; 145(3): 598-609.
[0305] 6. Liao S Y, Aurelio O N, Jan K, Zavada J, Stanbridge E J. Identification of the MN/CA9 protein as a reliable diagnostic biomarker of clear cell carcinoma of the kidney. Cancer research 1997; 57(14): 2827-31.
[0306] 7. Atkins M, Regan M, McDermott D, Mier J, Stanbridge E, Youmans A et al. Carbonic anhydrase IX expression predicts outcome of interleukin 2 therapy for renal cancer. Clin Cancer Res 2005; 11(10): 3714-21.
[0307] 8. Lokich J. Spontaneous regression of metastatic renal cancer. Case report and literature review. Am J Clin Oncol 1997; 20(4): 416-8.
[0308] 9. Chang A E, Li Q, Jiang G, Sayre D M, Braun T M, Redman B G. Phase II trial of autologous tumor vaccination, anti-CD3-activated vaccine-primed lymphocytes, and interleukin-2 in stage IV renal cell cancer. J Clin Oncol 2003; 21(5): 884-90.
[0309] 10. Dudley M E, Wunderlich J R, Robbins P F, Yang J C, Hwu P, Schwartzentruber D J et al. Cancer regression and autoimmunity in patients after clonal repopulation with antitumor lymphocytes. Science 2002; 298(5594): 850-4.
[0310] 11. Schaft N, Willemsen R A, de Vries J, Lankiewicz B, Essers B W, Gratama J W et al. Peptide fine specificity of anti-glycoprotein 100 CTL is preserved following transfer of engineered TCR alpha beta genes into primary human T lymphocytes. J Immunol 2003; 170(4): 2186-94.
[0311] 12. Bubenik J. MHC class I down-regulation: tumour escape from immune surveillance? (review). International journal of oncology 2004; 25(2): 487-91.
[0312] 13. Gajewski T F, Meng Y, Blank C, Brown I, Kacha A, Kline J et al. Immune resistance orchestrated by the tumor microenvironment. Immunological reviews 2006; 213: 131-45.
[0313] 14. Frigola X, Inman B A, Lohse C M, Krco C J, Cheville J C, Thompson R H et al. Identification of a soluble form of B7-H1 that retains immunosuppressive activity and is associated with aggressive renal cell carcinoma. Clin Cancer Res 2011; 17(7): 1915-23.
[0314] 15. Grepin R, Guyot M, Giuliano S, Boncompagni M, Ambrosetti D, Chamorey E et al. The CXCL7/CXCR1/2 axis is a key driver in the growth of clear cell renal cell carcinoma. Cancer research 2014; 74(3): 873-83.
[0315] 16. Sadelain M, Brentjens R, Riviere I. The promise and potential pitfalls of chimeric antigen receptors. Curr Opin Immunol 2009; 21(2): 215-23.
[0316] 17. Lamers C H, Sleijfer S, van Steenbergen S, van Elzakker P, van Krimpen B, Groot C et al. Treatment of metastatic renal cell carcinoma with CAIX CAR-engineered T cells: clinical evaluation and management of on-target toxicity. Molecular therapy: the journal of the American Society of Gene Therapy 2013; 21(4): 904-12.
[0317] 18. Milone M C, Fish J D, Carpenito C, Carroll R G, Binder G K, Teachey D et al. Chimeric receptors containing CD137 signal transduction domains mediate enhanced survival of T cells and increased antileukemic efficacy in vivo. Molecular therapy: the journal of the American Society of Gene Therapy 2009; 17(8): 1453-64.
[0318] 19. Wilkie S, Picco G, Foster J, Davies D M, Julien S, Cooper L et al. Retargeting of human T cells to tumor-associated MUC1: the evolution of a chimeric antigen receptor. J Immunol 2008; 180(7): 4901-9.
[0319] 20. Lo A S, Ma Q, Liu D L, Junghans R P. Anti-GD3 chimeric sFv-CD28/T-cell receptor zeta designer T cells for treatment of metastatic melanoma and other neuroectodermal tumors. Clin Cancer Res 2010; 16(10): 2769-80.
[0320] 21. Kalos M, Levine B L, Porter D L, Katz S, Grupp S A, Bagg A et al. T cells with chimeric antigen receptors have potent antitumor effects and can establish memory in patients with advanced leukemia. Science translational medicine 2011; 3(95): 95ra73.
[0321] 22. Pegram H J, Park J H, Brentjens R J. CD28z CARs and armored CARs. Cancer J 2014; 20(2): 127-33.
[0322] 23. Xu C, Lo A, Yammanuru A, Tallarico A S, Brady K, Murakami A et al. Unique biological properties of catalytic domain directed human anti-CAIX antibodies discovered through phage-display technology. PloS one 2010; 5(3): e9625.
[0323] 24. Sui J, Aird D R, Tamin A, Murakami A, Yan M, Yammanuru A et al. Broadening of neutralization activity to directly block a dominant antibody-driven SARS-coronavirus evolution pathway. PLoS pathogens 2008; 4(11): e1000197.
[0324] 25. Mirzabekov T, Kontos H, Farzan M, Marasco W, Sodroski J. Paramagnetic proteoliposomes containing a pure, native, and oriented seven-transmembrane segment protein, CCRS. Nat Biotechnol 2000; 18(6): 649-54.
[0325] 26. Wald O, Weiss I D, Wald H, Shoham H, Bar-Shavit Y, Beider K et al. IFN-gamma acts on T cells to induce N K cell mobilization and accumulation in target organs. J Immunol 2006; 176(8): 4716-29.
[0326] 27. Zeytin H, Reali E, Zaharoff D A, Rogers C J, Schlom J, Greiner J W. Targeted delivery of murine IFN-gamma using a recombinant fowlpox virus: N K cell recruitment to regional lymph nodes and priming of tumor-specific host immunity. Journal of interferon & cytokine research: the official journal of the International Society for Interferon and Cytokine Research 2008; 28(2): 73-87.
[0327] 28. Murugaiyan G, Saha B. Protumor vs antitumor functions of IL-17. J Immunol 2009; 183(7): 4169-75.
[0328] 29. Bar E, Whitney P G, Moor K, Reis e Sousa C, LeibundGut-Landmann S. IL-17 regulates systemic fungal immunity by controlling the functional competence of NK cells. Immunity 2014; 40(1): 117-27.
[0329] 30. Hinrichs C S, Kaiser A, Paulos C M, Cassard L, Sanchez-Perez L, Heemskerk B et al. Type 17 CD8+ T cells display enhanced antitumor immunity. Blood 2009; 114(3): 596-9.
[0330] 31. Hombach A A, Rappl G, Abken H. Arming cytokine-induced killer cells with chimeric antigen receptors: CD28 outperforms combined CD28-OX40 “super-stimulation”. Molecular therapy: the journal of the American Society of Gene Therapy 2013; 21(12): 2268-77.
[0331] 32. Mor F, Cohen I R. IL-2 rescues antigen-specific T cells from radiation or dexamethasone-induced apoptosis. Correlation with induction of Bcl-2. J Immunol 1996; 156(2): 515-22.
[0332] 33. Isakov N, Altman A. PKC-theta-mediated signal delivery from the TCR/CD28 surface receptors. Frontiers in immunology 2012; 3: 273.
[0333] 34. Loskog A, Giandomenico V, Rossig C, Pule M, Dotti G, Brenner M K. Addition of the CD28 signaling domain to chimeric T-cell receptors enhances chimeric T-cell resistance to T regulatory cells. Leukemia 2006; 20(10): 1819-28.
[0334] 35. Schwarzer A, Wolf B, Fisher J L, Schwaab T, Olek S, Baron U et al. Regulatory T-cells and associated pathways in metastatic renal cell carcinoma (mRCC) patients undergoing DC-vaccination and cytokine-therapy. PloS one 2012; 7(10): e46600.
[0335] 36. Lamers C H, Willemsen R, van Elzakker P, van Steenbergen-Langeveld S, Broertjes M, Oosterwijk-Wakka J et al. Immune responses to transgene and retroviral vector in patients treated with ex vivo-engineered T cells. Blood 2011; 117(1): 72-82.
[0336] 37. Miotti S, Negri D R, Valota O, Calabrese M, Bolhuis R L, Gratama J W et al. Level of anti-mouse-antibody response induced by bi-specific monoclonal antibody OC/TR in ovarian-carcinoma patients is associated with longer survival. International journal of cancer. Journal international du cancer 1999; 84(1): 62-8.
[0337] 38. Kershaw M H, Westwood J A, Parker L L, Wang G, Eshhar Z, Mavroukakis S A et al. A phase I study on adoptive immunotherapy using gene-modified T cells for ovarian cancer. Clin Cancer Res 2006; 12(20 Pt 1): 6106-15.
[0338] 39. Pastorekova S. Carbonic anhydrase IX (CA IX) as a potential target for cancer therapy. Cancer Therapy 2004; 2: 245-262.
[0339] 40. Pastorekova S, Parkkila S, Parkkila A K, Opaysky R, Zelnik V, Saarnio J et al. Carbonic anhydrase IX, MN/CA IX: analysis of stomach complementary DNA sequence and expression in human and rat alimentary tracts. Gastroenterology 1997; 112(2): 398-408.
[0340] 41. Saarnio J, Parkkila S, Parkkila A K, Waheed A, Casey M C, Zhou X Y et al. Immunohistochemistry of carbonic anhydrase isozyme IX (MN/CA IX) in human gut reveals polarized expression in the epithelial cells with the highest proliferative capacity. The journal of histochemistry and cytochemistry: official journal of the Histochemistry Society 1998; 46(4): 497-504.
[0341] 42. Zavada J, Zavadova Z, Zat'ovicova M, Hyrsl L, Kawaciuk I. Soluble form of carbonic anhydrase IX (CA IX) in the serum and urine of renal carcinoma patients. Br J Cancer 2003; 89(6): 1067-71.
[0342] 43. Hombach A, Koch D, Sircar R, Heuser C, Diehl V, Kruis W et al. A chimeric receptor that selectively targets membrane-bound carcinoembryonic antigen (mCEA) in the presence of soluble CEA. Gene Ther 1999; 6(2): 300-4.
[0343] 44. Carpenito C, Milone M C, Hassan R, Simonet J C, Lakhal M, Suhoski M M et al. Control of large, established tumor xenografts with genetically retargeted human T cells containing CD28 and CD137 domains. Proceedings of the National Academy of Sciences of the United States of America 2009; 106(9): 3360-5.
[0344] 45. Gill S, Tasian S K, Ruella M, Shestova O, Li Y, Porter D L et al. Efficacy against human acute myeloid leukemia and myeloablation of normal hematopoiesis in a mouse model using chimeric antigen receptor-modified T cells. Blood 2014.
[0345] 46. Hombach A A, Heiders J, Foppe M, Chmielewski M, Abken H. OX40 costimulation by a chimeric antigen receptor abrogates CD28 and IL-2 induced IL-10 secretion by redirected CD4(+) T cells. Oncoimmunology 2012; 1(4): 458-466.
[0346] 47. Song D G, Ye Q, Carpenito C, Poussin M, Wang L P, Ji C et al. In vivo persistence, tumor localization, and antitumor activity of CAR-engineered T cells is enhanced by costimulatory signaling through CD137 (4-1BB). Cancer research 2011; 71(13): 4617-27.
[0347] 48. Bedke J, Stenzl A. Immunotherapeutic strategies for the treatment of renal cell carcinoma: where are we now? Expert review of anticancer therapy 2013; 13(12): 1399-408.
[0348] 49. Bailey A, McDermott D F. Immune checkpoint inhibitors as novel targets for renal cell carcinoma therapeutics. Cancer J 2013; 19(4): 348-52.
[0349] 50. Maher J, Brentjens R J, Gunset G, Riviere I, Sadelain M. Human T-lymphocyte cytotoxicity and proliferation directed by a single chimeric TCRzeta/CD28 receptor. Nat Biotechnol 2002; 20(1): 70-5.
[0350] 51. Ferlay J, Soerjomataram I, Dikshit R, Eser S, Mathers C, Rebelo M, et al. Cancer incidence and mortality worldwide: sources, methods and major patterns in GLOBOCAN 2012. International journal of cancer. 2015; 136:E359-86.
[0351] 52. Dutcher J P. Recent developments in the treatment of renal cell carcinoma. Therapeutic advances in urology. 2013; 5:338-53.
[0352] 53. Cohen H T, McGovern F J. Renal-cell carcinoma. The New England journal of medicine. 2005; 353:2477-90.
[0353] 54. Sedlakova O, Svastova E, Takacova M, Kopacek J, Pastorek J, Pastorekova S. Carbonic anhydrase IX, a hypoxia-induced catalytic component of the pH regulating machinery in tumors. Frontiers in physiology. 2014; 4:400.
[0354] 55. Benej M, Pastorekova S, Pastorek J. Carbonic anhydrase IX: regulation and role in cancer. Sub-cellular biochemistry. 2014; 75:199-219.
[0355] 56. Tostain J, Li G, Gentil-Perret A, Gigante M. Carbonic anhydrase 9 in clear cell renal cell carcinoma: a marker for diagnosis, prognosis and treatment. European journal of cancer. 2010; 46:3141-8.
[0356] 57. Genega E M, Ghebremichael M, Najarian R, Fu Y, Wang Y, Argani P, et al. Carbonic anhydrase IX expression in renal neoplasms: correlation with tumor type and grade. American journal of clinical pathology. 2010; 134:873-9.
[0357] 58. Alegre M L, Frauwirth K A, Thompson C B. T-cell regulation by CD28 and CTLA-4. Nature reviews Immunology. 2001; 1:220-8.
[0358] 59. Pardoll D M. The blockade of immune checkpoints in cancer immunotherapy. Nature reviews Cancer. 2012; 12:252-64.
[0359] 60. Harshman L C, Drake C G, Choueiri T K. PD-1 blockade in renal cell carcinoma: to equilibrium and beyond. Cancer immunology research. 2014; 2:1132-41.
[0360] 61. Srivastava S, Riddell S R. Engineering CAR-T cells: Design concepts. Trends in immunology. 2015; 36:494-502.
[0361] 62. Maude S L, Frey N, Shaw P A, Aplenc R, Barrett D M, Bunin N J, et al. Chimeric antigen receptor T cells for sustained remissions in leukemia. The New England journal of medicine. 2014; 371:1507-17.
[0362] 63. Zhu Y, Tan Y, Ou R, Zhong Q, Zheng L, Du Y, et al. Anti-CD19 chimeric antigen receptor-modified T cells for B-cell malignancies: a systematic review of efficacy and safety in clinical trials. European journal of haematology. 2015.
[0363] 64. Kakarla S, Gottschalk S. CAR T cells for solid tumors: armed and ready to go? Cancer journal. 2014; 20:151-5.
[0364] 65. Lo A S, Xu C, Murakami A, Marasco W A. Regression of established renal cell carcinoma in nude mice using lentivirus-transduced human T-cells expressing a human anti-CAIX chimeric antigen receptor. Molecular Therapy—Oncolytics. 2014; 1:1-12.
[0365] 66. Hsu C Y, Uludag H. A simple and rapid nonviral approach to efficiently transfect primary tissue-derived cells using polyethylenimine. Nature protocols. 2012; 7:935-45.
[0366] 67. Singh H, Figliola M J, Dawson M J, Huls H, Olivares S, Switzer K, et al. Reprogramming CD19-specific T cells with IL-21 signaling can improve adoptive immunotherapy of B-lineage malignancies. Cancer research. 2011; 71:3516-27.
[0367] 68. June C, Rosenberg S A, Sadelain M, Weber J S. T-cell therapy at the threshold. Nature biotechnology. 2012; 30:611-4.
[0368] 69. Chang D K, Moniz R J, Xu Z, Sun J, Signoretti S, Zhu Q, et al. Human anti-CAIX antibodies mediate immune cell inhibition of renal cell carcinoma in vitro and in a humanized mouse model in vivo. Molecular cancer. 2015; 14:119.
[0369] 70. Kaka A S, Shaffer D R, Hartmaier R, Leen A M, Lu A, Bear A, et al. Genetic modification of T cells with IL-21 enhances antigen presentation and generation of central memory tumor-specific cytotoxic T-lymphocytes. Journal of immunotherapy. 2009; 32:726-36.
[0370] 71. Li Y, Bleakley M, Yee C. IL-21 influences the frequency, phenotype, and affinity of the antigen-specific CD8 T cell response. Journal of immunology. 2005; 175:2261-9.
[0371] 72. van der Stegen S J, Hamieh M, Sadelain M. The pharmacology of second-generation chimeric antigen receptors. Nature reviews Drug discovery. 2015; 14:499-509.
[0372] 73. Long A H, Haso W M, Shern J F, Wanhainen K M, Murgai M, Ingaramo M, et al. 4-1BB costimulation ameliorates T cell exhaustion induced by tonic signaling of chimeric antigen receptors. Nature medicine. 2015; 21:581-90.
[0373] 74. Lee D W, Kochenderfer J N, Stetler-Stevenson M, Cui Y K, Delbrook C, Feldman S A, et al. T cells expressing CD19 chimeric antigen receptors for acute lymphoblastic leukaemia in children and young adults: a phase 1 dose-escalation trial. Lancet. 2015; 385:517-28.
[0374] 75. Virgin H W, Wherry E J, Ahmed R. Redefining chronic viral infection. Cell. 2009; 138:30-50.
[0375] 76. Wherry E J. T cell exhaustion. Nature immunology. 2011; 12:492-9.
[0376] 77. Topalian S L, Hodi F S, Brahmer J R, Gettinger S N, Smith D C, McDermott D F, et al. Safety, activity, and immune correlates of anti-PD-1 antibody in cancer. The New England journal of medicine. 2012; 366:2443-54.
[0377] 78. Brahmer J R, Tykodi S S, Chow L Q, Hwu W J, Topalian S L, Hwu P, et al. Safety and activity of anti-P D-L1 antibody in patients with advanced cancer. The New England journal of medicine. 2012; 366:2455-65.
[0378] 79. John L B, Devaud C, Duong C P, Yong C S, Beavis P A, Haynes N M, et al. Anti-PD-1 antibody therapy potently enhances the eradication of established tumors by gene-modified T cells. Clinical cancer research: an official journal of the American Association for Cancer Research. 2013; 19:5636-46.

We claim:

1. A chimeric antigen receptor (CAR) comprising an intracellular signaling domain, a transmembrane domain and an extracellular domain

2. The CAR of claim 1, wherein the transmembrane domain further comprises a stalk region positioned between the extracellular domain and the transmembrane domain.

3. The CAR or claim 1, wherein the transmembrane domain comprises CD28.

4. The CAR of claim 1, further comprising one or more additional costimulatory molecules positioned between the transmembrane domain and the intracellular signaling domain

5. The CAR of claim 4, wherein the costimulatory molecules is CD28, 4-1BB, ICOS, or OX40.

6. The CAR of claim 1, wherein the intracellular signaling domain comprises a CD3 zeta chain.

7. The CAR of claim 1, wherein the extracellular domain is an antibody.

8. The CAR of claim 7, wherein the antibody is a Fab or a scFV.

9. The CAR of claim 7, wherein the antibody is specific for BCMA, CD138, CCR4, PD-1, PDL-1, PD-L2, CXCR4, GITR, SARS virus, flavivirus, MERS virus, influenza virus, or CAIX.

10. A nucleic acid encoding the CAR of any one of the preceding claims further comprising a nucleic acid encoding a polypeptide positioned after the intracellular signaling domain.

11. The nucleic acid of claim 10, wherein the polypeptide is an antibody

12. The nucleic acid of claim 11, wherein the antibody is a scFV.

13. The nucleic acid of claim 12, wherein the antibody is specific for BCMA, CD138, CCR4, PD-1, PDL-1, PD-L2, CXCR4, GITR, SARS virus, flavivirus, MERS virus, influenza virus, or CAIX

14. A vector comprising the nucleic acid of claim 11.

15. A cell comprising the vector of claim 14.

16. A genetically engineered cell which express and bear on the cell surface membrane the chimeric antigen receptor of claim 1.

17. The genetically engineered cell of claim 16, wherein the cell is a T-cell or an NK cell.

18. The genetically engineered cell of claim 17, wherein the T cell is CD4⁺ or CD8⁺.

19. The genetically engineered cell of claim 18, which comprises a mixed population of CD4⁺ and CD8 cells⁺.

20. The cell of claim 16, wherein the cell is further engineered to express and secrete a polypeptide

21. The cell of claim 20, wherein the expressed and secreted polypeptide is anti-PDL-1.

The application's sequence listing, which the Patent Office published only in electronic form, follows.

SEQUENCE LISTING (1673 sequences)

SEQ ID NO: 1 - protein, 8 aa, Artificial Sequence
  Synthetic Polypeptide
GGPFSSYA

SEQ ID NO: 2 - protein, 8 aa, Artificial Sequence
  Synthetic Polypeptide
GGIFSSYA

SEQ ID NO: 3 - protein, 8 aa, Artificial Sequence
  Synthetic Polypeptide
GGTFSSYA

SEQ ID NO: 4 - protein, 8 aa, Artificial Sequence
  Synthetic Polypeptide
GVTFSSYA

SEQ ID NO: 5 - protein, 8 aa, Artificial Sequence
  Synthetic Polypeptide
GVTFSSYA

SEQ ID NO: 6 - protein, 8 aa, Artificial Sequence
  Synthetic Polypeptide
GVTFSSYA

SEQ ID NO: 7 - protein, 8 aa, Artificial Sequence
  Synthetic Polypeptide
GGTFSSYA

SEQ ID NO: 8 - protein, 8 aa, Artificial Sequence
  Synthetic Polypeptide
GGTFSSYA

SEQ ID NO: 9 - protein, 8 aa, Artificial Sequence
  Synthetic Polypeptide
GGTFSSYA

SEQ ID NO: 10 - protein, 8 aa, Artificial Sequence
  Synthetic Polypeptide
GVTFSSYA

SEQ ID NO: 11 - protein, 8 aa, Artificial Sequence
  Synthetic Polypeptide
GVTFRSYA

SEQ ID NO: 12 - protein, 8 aa, Artificial Sequence
  Synthetic Polypeptide
GGTFSSYA

SEQ ID NO: 13 - protein, 8 aa, Artificial Sequence
  Synthetic Polypeptide
GGPFSSYA

SEQ ID NO: 14 - protein, 8 aa, Artificial Sequence
  Synthetic Polypeptide
GGTFSSYA

SEQ ID NO: 15 - protein, 8 aa, Artificial Sequence
  Synthetic Polypeptide
GGTFSSYA

SEQ ID NO: 16 - protein, 8 aa, Artificial Sequence
  Synthetic Polypeptide
GVTFSSYA

SEQ ID NO: 17 - protein, 8 aa, Artificial Sequence
  Synthetic Polypeptide
GVTFSSYA

SEQ ID NO: 18 - protein, 8 aa, Artificial Sequence
  Synthetic Polypeptide
GVTFSSYA

SEQ ID NO: 19 - protein, 8 aa, Artificial Sequence
  Synthetic Polypeptide
GGPFSSYA

SEQ ID NO: 20 - protein, 8 aa, Artificial Sequence
  Synthetic Polypeptide
GGPFSSYA

SEQ ID NO: 21 - protein, 8 aa, Artificial Sequence
  Synthetic Polypeptide
GVTFSSYA

SEQ ID NO: 22 - protein, 8 aa, Artificial Sequence
  Synthetic Polypeptide
GGTFSSYA

SEQ ID NO: 23 - protein, 8 aa, Artificial Sequence
  Synthetic Polypeptide
GGTFSSYA

SEQ ID NO: 24 - protein, 8 aa, Artificial Sequence
  Synthetic Polypeptide
GVTFSSYA

SEQ ID NO: 25 - protein, 8 aa, Artificial Sequence
  Synthetic Polypeptide
GVTFSSYA

SEQ ID NO: 26 - protein, 8 aa, Artificial Sequence
  Synthetic Polypeptide
GVTFSSYA

SEQ ID NO: 27 - protein, 8 aa, Artificial Sequence
  Synthetic Polypeptide
GGTFSSYA

SEQ ID NO: 28 - protein, 8 aa, Artificial Sequence
  Synthetic Polypeptide
GGIFSSYA

SEQ ID NO: 29 - protein, 8 aa, Artificial Sequence
  Synthetic Polypeptide
GGTFSSYA

SEQ ID NO: 30 - protein, 8 aa, Artificial Sequence
  Synthetic Polypeptide
GGTFSSYA

SEQ ID NO: 31 - protein, 8 aa, Artificial Sequence
  Synthetic Polypeptide
GGTFSSYA

SEQ ID NO: 32 - protein, 8 aa, Artificial Sequence
  Synthetic Polypeptide
GGTFSSYA

SEQ ID NO: 33 - protein, 8 aa, Artificial Sequence
  Synthetic Polypeptide
GGTFSSYA

SEQ ID NO: 34 - protein, 8 aa, Artificial Sequence
  Synthetic Polypeptide
GVTFRSYA

SEQ ID NO: 35 - protein, 8 aa, Artificial Sequence
  Synthetic Polypeptide
GGTFSSYA

SEQ ID NO: 36 - protein, 8 aa, Artificial Sequence
  Synthetic Polypeptide
GVTFSSYA

SEQ ID NO: 37 - protein, 8 aa, Artificial Sequence
  Synthetic Polypeptide
ISPMFGTA

SEQ ID NO: 38 - protein, 8 aa, Artificial Sequence
  Synthetic Polypeptide
ISPIFGTA

SEQ ID NO: 39 - protein, 8 aa, Artificial Sequence
  Synthetic Polypeptide
ISPIFGTA

SEQ ID NO: 40 - protein, 8 aa, Artificial Sequence
  Synthetic Polypeptide
ISPIFGTA

SEQ ID NO: 41 - protein, 8 aa, Artificial Sequence
  Synthetic Polypeptide
IMPMFGTA

SEQ ID NO: 42 - protein, 8 aa, Artificial Sequence
  Synthetic Polypeptide
ISPLFGTA

SEQ ID NO: 43 - protein, 8 aa, Artificial Sequence
  Synthetic Polypeptide
ISPIFGTA

SEQ ID NO: 44 - protein, 8 aa, Artificial Sequence
  Synthetic Polypeptide
ISPIFGTA

SEQ ID NO: 45 - protein, 8 aa, Artificial Sequence
  Synthetic Polypeptide
ISPMFGTA

SEQ ID NO: 46 - protein, 8 aa, Artificial Sequence
  Synthetic Polypeptide
ISPIFGTA

SEQ ID NO: 47 - protein, 8 aa, Artificial Sequence
  Synthetic Polypeptide
ISGIFGTA

SEQ ID NO: 48 - protein, 8 aa, Artificial Sequence
  Synthetic Polypeptide
ISPMFGTA

SEQ ID NO: 49 - protein, 8 aa, Artificial Sequence
  Synthetic Polypeptide
ISGIFGTA

SEQ ID NO: 50 - protein, 8 aa, Artificial Sequence
  Synthetic Polypeptide
ISPIFGTA

SEQ ID NO: 51 - protein, 8 aa, Artificial Sequence
  Synthetic Polypeptide
ISPIFGTA

SEQ ID NO: 52 - protein, 8 aa, Artificial Sequence
  Synthetic Polypeptide
ISPMFGTA

SEQ ID NO: 53 - protein, 8 aa, Artificial Sequence
  Synthetic Polypeptide
ITPMFGTA

SEQ ID NO: 54 - protein, 8 aa, Artificial Sequence
  Synthetic Polypeptide
ISPLFGTA

SEQ ID NO: 55 - protein, 8 aa, Artificial Sequence
  Synthetic Polypeptide
ISPMFGTA

SEQ ID NO: 56 - protein, 8 aa, Artificial Sequence
  Synthetic Polypeptide
ISPLFGTA

SEQ ID NO: 57 - protein, 8 aa, Artificial Sequence
  Synthetic Polypeptide
ISPMFGTA

SEQ ID NO: 58 - protein, 8 aa, Artificial Sequence
  Synthetic Polypeptide
ISPLFGTA

SEQ ID NO: 59 - protein, 8 aa, Artificial Sequence
  Synthetic Polypeptide
ISPIFGTA

SEQ ID NO: 60 - protein, 8 aa, Artificial Sequence
  Synthetic Polypeptide
ISPIFGTA

SEQ ID NO: 61 - protein, 8 aa, Artificial Sequence
  Synthetic Polypeptide
ISPLFGTA

SEQ ID NO: 62 - protein, 8 aa, Artificial Sequence
  Synthetic Polypeptide
ISPIFGTA

SEQ ID NO: 63 - protein, 8 aa, Artificial Sequence
  Synthetic Polypeptide
ISPMFGTA

SEQ ID NO: 64 - protein, 8 aa, Artificial Sequence
  Synthetic Polypeptide
ISPIFGTA

SEQ ID NO: 65 - protein, 8 aa, Artificial Sequence
  Synthetic Polypeptide
ITPIFGTA

SEQ ID NO: 66 - protein, 8 aa, Artificial Sequence
  Synthetic Polypeptide
ISPIFGTA

SEQ ID NO: 67 - protein, 8 aa, Artificial Sequence
  Synthetic Polypeptide
IIPIFGTA

SEQ ID NO: 68 - protein, 8 aa, Artificial Sequence
  Synthetic Polypeptide
ITPMFGTA

SEQ ID NO: 69 - protein, 8 aa, Artificial Sequence
  Synthetic Polypeptide
ISAMFGTA

SEQ ID NO: 70 - protein, 8 aa, Artificial Sequence
  Synthetic Polypeptide
IIPIFGTA

SEQ ID NO: 71 - protein, 8 aa, Artificial Sequence
  Synthetic Polypeptide
ITPMFGTA

SEQ ID NO: 72 - protein, 8 aa, Artificial Sequence
  Synthetic Polypeptide
ISPMFGTA

SEQ ID NO: 73 - protein, 17 aa, Artificial Sequence
  Synthetic Polypeptide
ARDDGYAPSGGLREFDV

SEQ ID NO: 74 - protein, 14 aa, Artificial Sequence
  Synthetic Polypeptide
ARGRGAYMGPSMDV

SEQ ID NO: 75 - protein, 14 aa, Artificial Sequence
  Synthetic Polypeptide
ARGARYYAGGYFDV

SEQ ID NO: 76 - protein, 18 aa, Artificial Sequence
  Synthetic Polypeptide
ARDSGNYDGYGPGSRFDV

SEQ ID NO: 77 - protein, 14 aa, Artificial Sequence
  Synthetic Polypeptide
ARERGSWSFGYFDV

SEQ ID NO: 78 - protein, 14 aa, Artificial Sequence
  Synthetic Polypeptide
ARSRTYADGRTFDV

SEQ ID NO: 79 - protein, 17 aa, Artificial Sequence
  Synthetic Polypeptide
ARELGYLAGSPSPGFDY

SEQ ID NO: 80 - protein, 14 aa, Artificial Sequence
  Synthetic Polypeptide
ARSRRYWADGGFDY

SEQ ID NO: 81 - protein, 15 aa, Artificial Sequence
  Synthetic Polypeptide
AREGGYSPGGVDFDY

SEQ ID NO: 82 - protein, 14 aa, Artificial Sequence
  Synthetic Polypeptide
ARGTTYSTARYFDV

SEQ ID NO: 83 - protein, 14 aa, Artificial Sequence
  Synthetic Polypeptide
ARSPAYYFGPNMDV

SEQ ID NO: 84 - protein, 16 aa, Artificial Sequence
  Synthetic Polypeptide
ARSSRYAPSDSTNFDQ

SEQ ID NO: 85 - protein, 14 aa, Artificial Sequence
  Synthetic Polypeptide
ARGDRFYVGERFDV

SEQ ID NO: 86 - protein, 18 aa, Artificial Sequence
  Synthetic Polypeptide
ARGGGVGRIWIAGYGFDQ

SEQ ID NO: 87 - protein, 18 aa, Artificial Sequence
  Synthetic Polypeptide
ARGPGYHPAGASGQFFDL

SEQ ID NO: 88 - protein, 16 aa, Artificial Sequence
  Synthetic Polypeptide
ARGRGYAPDALTNFDV

SEQ ID NO: 89 - protein, 15 aa, Artificial Sequence
  Synthetic Polypeptide
ARGRGYIAVAGDMDV

SEQ ID NO: 90 - protein, 17 aa, Artificial Sequence
  Synthetic Polypeptide
ARGDAYYVGGGARPFDL

SEQ ID NO: 91 - protein, 18 aa, Artificial Sequence
  Synthetic Polypeptide
ARGYSYYPGGGGGRNFDY

SEQ ID NO: 92 - protein, 17 aa, Artificial Sequence
  Synthetic Polypeptide
ARAPTYYASRDSYNFDY

SEQ ID NO: 93 - protein, 14 aa, Artificial Sequence
  Synthetic Polypeptide
ARDTTYIAGGHFDV

SEQ ID NO: 94 - protein, 15 aa, Artificial Sequence
  Synthetic Polypeptide
ARASGYFTGWGTFDY

SEQ ID NO: 95 - protein, 14 aa, Artificial Sequence
  Synthetic Polypeptide
ARGRYYYTVGVYDV

SEQ ID NO: 96 - protein, 20 aa, Artificial Sequence
  Synthetic Polypeptide
ARGGGYSADGGAGNNTIFDV

SEQ ID NO: 97 - protein, 15 aa, Artificial Sequence
  Synthetic Polypeptide
ARERGYTVGGGGMDV

SEQ ID NO: 98 - protein, 17 aa, Artificial Sequence
  Synthetic Polypeptide
AREYLGDDYSSGSYFDV

SEQ ID NO: 99 - protein, 14 aa, Artificial Sequence
  Synthetic Polypeptide
ARESGYSGTGQFDV

SEQ ID NO: 100 - protein, 15 aa, Artificial Sequence
  Synthetic Polypeptide
ARSGGYYDYGVGYDQ

SEQ ID NO: 101 - protein, 15 aa, Artificial Sequence
  Synthetic Polypeptide
ARSGGYSPSIGGFDV

SEQ ID NO: 102 - protein, 16 aa, Artificial Sequence
  Synthetic Polypeptide
ARGPGYDPSSLRGFDV

SEQ ID NO: 103 - protein, 10 aa, Artificial Sequence
  Synthetic Polypeptide
ARGEEAYYDL

SEQ ID NO: 104 - protein, 15 aa, Artificial Sequence
  Synthetic Polypeptide
ARGTSYLPGRSGFDV

SEQ ID NO: 105 - protein, 15 aa, Artificial Sequence
  Synthetic Polypeptide
ARGRGYDPSVGGFDV

SEQ ID NO: 106 - protein, 20 aa, Artificial Sequence
  Synthetic Polypeptide
ARDSTPSVTSSLYRIPAFDV

SEQ ID NO: 107 - protein, 15 aa, Artificial Sequence
  Synthetic Polypeptide
ARGPGYYPDSNNYDL

SEQ ID NO: 108 - protein, 15 aa, Artificial Sequence
  Synthetic Polypeptide
ARGGTYSPGGTYFDV

SEQ ID NO: 109 - protein, 12 aa, Artificial Sequence
  Synthetic Polypeptide
RSVLYSSNNKNY

SEQ ID NO: 110 - protein, 6 aa, Artificial Sequence
  Synthetic Polypeptide
NIGSKS

SEQ ID NO: 111 - protein, 6 aa, Artificial Sequence
  Synthetic Polypeptide
QTVSNY

SEQ ID NO: 112 - protein, 8 aa, Artificial Sequence
  Synthetic Polypeptide
SSNIGSNT

SEQ ID NO: 113 - protein, 6 aa, Artificial Sequence
  Synthetic Polypeptide
HIGSKS

SEQ ID NO: 114 - protein, 9 aa, Artificial Sequence
  Synthetic Polypeptide
SSDVGGYNH

SEQ ID NO: 115 - protein, 9 aa, Artificial Sequence
  Synthetic Polypeptide
SSDVGGYNY

SEQ ID NO: 116 - protein, 8 aa, Artificial Sequence
  Synthetic Polypeptide
SSNMGRNT

SEQ ID NO: 117 - protein, 8 aa, Artificial Sequence
  Synthetic Polypeptide
SGSIASTY

SEQ ID NO: 118 - protein, 8 aa, Artificial Sequence
  Synthetic Polypeptide
SGSIASNY

SEQ ID NO: 119 - protein, 9 aa, Artificial Sequence
  Synthetic Polypeptide
SSNIGAGYD

SEQ ID NO: 120 - protein, 8 aa, Artificial Sequence
  Synthetic Polypeptide
SGSIASNY

SEQ ID NO: 121 - protein, 6 aa, Artificial Sequence
  Synthetic Polypeptide
DIGSKS

SEQ ID NO: 122 - protein, 9 aa, Artificial Sequence
  Synthetic Polypeptide
SGSVSTSNY

SEQ ID NO: 123 - protein, 8 aa, Artificial Sequence
  Synthetic Polypeptide
SNNVGNQG

SEQ ID NO: 124 - protein, 12 aa, Artificial Sequence
  Synthetic Polypeptide
RSLFDSSDNKNY

SEQ ID NO: 125 - protein, 12 aa, Artificial Sequence
  Synthetic Polypeptide
RSVLYSSNNKNY

SEQ ID NO: 126 - protein, 8 aa, Artificial Sequence
  Synthetic Polypeptide
SSNIGVNY

SEQ ID NO: 127 - protein, 8 aa, Artificial Sequence
  Synthetic Polypeptide
SSNIGSNT

SEQ ID NO: 128 - protein, 7 aa, Artificial Sequence
  Synthetic Polypeptide
QSVDRGY

SEQ ID NO: 129 - protein, 9 aa, Artificial Sequence
  Synthetic Polypeptide
SSDIGAYNY

SEQ ID NO: 130 - protein, 6 aa, Artificial Sequence
  Synthetic Polypeptide
ALPKQY

SEQ ID NO: 131 - protein, 8 aa, Artificial Sequence
  Synthetic Polypeptide
SDNVGNQG

SEQ ID NO: 132 - protein, 8 aa, Artificial Sequence
  Synthetic Polypeptide
NNNVGNQG

SEQ ID NO: 133 - protein, 9 aa, Artificial Sequence
  Synthetic Polypeptide
SSDVGAHNF

SEQ ID NO: 134 - protein, 6 aa, Artificial Sequence
  Synthetic Polypeptide
QSVDSH

SEQ ID NO: 135 - protein, 8 aa, Artificial Sequence
  Synthetic Polypeptide
TSNVGRNT

SEQ ID NO: 136 - protein, 8 aa, Artificial Sequence
  Synthetic Polypeptide
RSNIGSNT

SEQ ID NO: 137 - protein, 8 aa, Artificial Sequence
  Synthetic Polypeptide
RSNIGRNT

SEQ ID NO: 138 - protein, 8 aa, Artificial Sequence
  Synthetic Polypeptide
SNNVGNQG

SEQ ID NO: 139 - protein, 6 aa, Artificial Sequence
  Synthetic Polypeptide
QSVSSF

SEQ ID NO: 140 - protein, 6 aa, Artificial Sequence
  Synthetic Polypeptide
ALPKQY

SEQ ID NO: 141 - protein, 8 aa, Artificial Sequence
  Synthetic Polypeptide
SGSIASNY

SEQ ID NO: 142 - protein, 7 aa, Artificial Sequence
  Synthetic Polypeptide
NGPSNYI

SEQ ID NO: 143 - protein, 7 aa, Artificial Sequence
  Synthetic Polypeptide
QSVSSSY

SEQ ID NO: 144 - protein, 8 aa, Artificial Sequence
  Synthetic Polypeptide
SSNIGVSF

SEQ ID NO: 145 - protein, 3 aa, Artificial Sequence
  Synthetic Polypeptide
WAS

SEQ ID NO: 146 - protein, 3 aa, Artificial Sequence
  Synthetic Polypeptide
DDS

SEQ ID NO: 147 - protein, 3 aa, Artificial Sequence
  Synthetic Polypeptide
AAS

SEQ ID NO: 148 - protein, 3 aa, Artificial Sequence
  Synthetic Polypeptide
SNN

SEQ ID NO: 149 - protein, 3 aa, Artificial Sequence
  Synthetic Polypeptide
SNN

SEQ ID NO: 150 - protein, 3 aa, Artificial Sequence
  Synthetic Polypeptide
DVS

SEQ ID NO: 151 - protein, 3 aa, Artificial Sequence
  Synthetic Polypeptide
EVT

SEQ ID NO: 152 - protein, 3 aa, Artificial Sequence
  Synthetic Polypeptide
DND

SEQ ID NO: 153 - protein, 3 aa, Artificial Sequence
  Synthetic Polypeptide
EDH

SEQ ID NO: 154 - protein, 3 aa, Artificial Sequence
  Synthetic Polypeptide
EDN

SEQ ID NO: 155 - protein, 3 aa, Artificial Sequence
  Synthetic Polypeptide
DNS

SEQ ID NO: 156 - protein, 3 aa, Artificial Sequence
  Synthetic Polypeptide
EDN

SEQ ID NO: 157 - protein, 3 aa, Artificial Sequence
  Synthetic Polypeptide
DDI

SEQ ID NO: 158 - protein, 3 aa, Artificial Sequence
  Synthetic Polypeptide
STN

SEQ ID NO: 159 - protein, 3 aa, Artificial Sequence
  Synthetic Polypeptide
RNN

SEQ ID NO: 160 - protein, 3 aa, Artificial Sequence
  Synthetic Polypeptide
WAS

SEQ ID NO: 161 - protein, 3 aa, Artificial Sequence
  Synthetic Polypeptide
WAS

SEQ ID NO: 162 - protein, 3 aa, Artificial Sequence
  Synthetic Polypeptide
RNN

SEQ ID NO: 163 - protein, 3 aa, Artificial Sequence
  Synthetic Polypeptide
SNN

SEQ ID NO: 164 - protein, 3 aa, Artificial Sequence
  Synthetic Polypeptide
GAS

SEQ ID NO: 165 - protein, 3 aa, Artificial Sequence
  Synthetic Polypeptide
EVS

SEQ ID NO: 166 - protein, 3 aa, Artificial Sequence
  Synthetic Polypeptide
KDS

SEQ ID NO: 167 - protein, 3 aa, Artificial Sequence
  Synthetic Polypeptide
RDN

SEQ ID NO: 168 - protein, 3 aa, Artificial Sequence
  Synthetic Polypeptide
RNN

SEQ ID NO: 169 - protein, 3 aa, Artificial Sequence
  Synthetic Polypeptide
EVN

SEQ ID NO: 170 - protein, 3 aa, Artificial Sequence
  Synthetic Polypeptide
GAS

SEQ ID NO: 171 - protein, 3 aa, Artificial Sequence
  Synthetic Polypeptide
NDN

SEQ ID NO: 172 - protein, 3 aa, Artificial Sequence
  Synthetic Polypeptide
SNN

SEQ ID NO: 173 - protein, 3 aa, Artificial Sequence
  Synthetic Polypeptide
SNN

SEQ ID NO: 174 - protein, 3 aa, Artificial Sequence
  Synthetic Polypeptide
KNN

SEQ ID NO: 175 - protein, 3 aa, Artificial Sequence
  Synthetic Polypeptide
DAS

SEQ ID NO: 176 - protein, 3 aa, Artificial Sequence
  Synthetic Polypeptide
KDT

SEQ ID NO: 177 - protein, 3 aa, Artificial Sequence
  Synthetic Polypeptide
EDN

SEQ ID NO: 178 - protein, 7 aa, Artificial Sequence
  Synthetic Polypeptide
LNSDGSH

SEQ ID NO: 179 - protein, 3 aa, Artificial Sequence
  Synthetic Polypeptide
GAS

SEQ ID NO: 180 - protein, 3 aa, Artificial Sequence
  Synthetic Polypeptide
RDD

SEQ ID NO: 181 - protein, 9 aa, Artificial Sequence
  Synthetic Polypeptide
QQYYSGSWT

SEQ ID NO: 182 - protein, 11 aa, Artificial Sequence
  Synthetic Polypeptide
QVWDRSSDHVV

SEQ ID NO: 183 - protein, 10 aa, Artificial Sequence
  Synthetic Polypeptide
QQYDNLPPVT

SEQ ID NO: 184 - protein, 11 aa, Artificial Sequence
  Synthetic Polypeptide
SAWDDSLGGEV

SEQ ID NO: 185 - protein, 11 aa, Artificial Sequence
  Synthetic Polypeptide
QVWDSSNDHPV

SEQ ID NO: 186 - protein, 10 aa, Artificial Sequence
  Synthetic Polypeptide
TSYAGSNSLV

SEQ ID NO: 187 - protein, 9 aa, Artificial Sequence
  Synthetic Polypeptide
SSYAGGKWV

SEQ ID NO: 188 - protein, 11 aa, Artificial Sequence
  Synthetic Polypeptide
AAWDDSLNGPV

SEQ ID NO: 189 - protein, 9 aa, Artificial Sequence
  Synthetic Polypeptide
QSFDASTLV

SEQ ID NO: 190 - protein, 11 aa, Artificial Sequence
  Synthetic Polypeptide
QSYDSDNHEVI

SEQ ID NO: 191 - protein, 11 aa, Artificial Sequence
  Synthetic Polypeptide
QSYDSSLSVVV

SEQ ID NO: 192 - protein, 10 aa, Artificial Sequence
  Synthetic Polypeptide
QSYDTSNRKV

SEQ ID NO: 193 - protein, 12 aa, Artificial Sequence
  Synthetic Polypeptide
QVWDTNSDPVFV

SEQ ID NO: 194 - protein, 10 aa, Artificial Sequence
  Synthetic Polypeptide
VLYMGSGISM

SEQ ID NO: 195 - protein, 11 aa, Artificial Sequence
  Synthetic Polypeptide
SAWDSSLSAWV

SEQ ID NO: 196 - protein, 11 aa, Artificial Sequence
  Synthetic Polypeptide
QQYFSSPPIFT

SEQ ID NO: 197 - protein, 9 aa, Artificial Sequence
  Synthetic Polypeptide
QQYYSTPPT

SEQ ID NO: 198 - protein, 12 aa, Artificial Sequence
  Synthetic Polypeptide
GVWDDSLNGHWV

SEQ ID NO: 199 - protein, 11 aa, Artificial Sequence
  Synthetic Polypeptide
AAWDDSLKGRV

SEQ ID NO: 200 - protein, 9 aa, Artificial Sequence
  Synthetic Polypeptide
QQYGSSRLS

SEQ ID NO: 201 - protein, 10 aa, Artificial Sequence
  Synthetic Polypeptide
SSYAGSNNVV

SEQ ID NO: 202 - protein, 9 aa, Artificial Sequence
  Synthetic Polypeptide
QAWDSSTAV

SEQ ID NO: 203 - protein, 11 aa, Artificial Sequence
  Synthetic Polypeptide
SAWDSSLTAVV

SEQ ID NO: 204 - protein, 11 aa, Artificial Sequence
  Synthetic Polypeptide
SAWDSSLSAWV

SEQ ID NO: 205 - protein, 11 aa, Artificial Sequence
  Synthetic Polypeptide
AAWDDSLDGPV

SEQ ID NO: 206 - protein, 9 aa, Artificial Sequence
  Synthetic Polypeptide
QQRSMWPLT

SEQ ID NO: 207 - protein, 11 aa, Artificial Sequence
  Synthetic Polypeptide
SSWDDDLNGPV

SEQ ID NO: 208 - protein, 8 aa, Artificial Sequence
  Synthetic Polypeptide
QSYDSSVV

SEQ ID NO: 209 - protein, 11 aa, Artificial Sequence
  Synthetic Polypeptide
AAWDVSLNGQV

SEQ ID NO: 210 - protein, 11 aa, Artificial Sequence
  Synthetic Polypeptide
SAWDSSLSDWV

SEQ ID NO: 211 - protein, 9 aa, Artificial Sequence
  Synthetic Polypeptide
QQRFNWPPT

SEQ ID NO: 212 - protein, 10 aa, Artificial Sequence
  Synthetic Polypeptide
QSADASENSV

SEQ ID NO: 213 - protein, 9 aa, Artificial Sequence
  Synthetic Polypeptide
QSYDTSNLV

SEQ ID NO: 214 - protein, 10 aa, Artificial Sequence
  Synthetic Polypeptide
ETWDSNTHVV

SEQ ID NO: 215 - protein, 9 aa, Artificial Sequence
  Synthetic Polypeptide
QQVNSFPRT

SEQ ID NO: 216 - protein, 11 aa, Artificial Sequence
  Synthetic Polypeptide
SAWDESLSSVL

SEQ ID NO: 217 - protein, 8 aa, Artificial Sequence
  Synthetic Polypeptide
GGTFSSYA

SEQ ID NO: 218 - protein, 8 aa, Artificial Sequence
  Synthetic Polypeptide
GVTFSSYA

SEQ ID NO: 219 - protein, 8 aa, Artificial Sequence
  Synthetic Polypeptide
GGTFSSYA

SEQ ID NO: 220 - protein, 8 aa, Artificial Sequence
  Synthetic Polypeptide
GGIFSSYA

SEQ ID NO: 221 - protein, 8 aa, Artificial Sequence
  Synthetic Polypeptide
GVIFSSYA

SEQ ID NO: 222 - protein, 8 aa, Artificial Sequence
  Synthetic Polypeptide
GGTFSSYA

SEQ ID NO: 223 - protein, 8 aa, Artificial Sequence
  Synthetic Polypeptide
GGTFSSYA

SEQ ID NO: 224 - protein, 8 aa, Artificial Sequence
  Synthetic Polypeptide
GGPFRSYA

SEQ ID NO: 225 - protein, 8 aa, Artificial Sequence
  Synthetic Polypeptide
GVPFSSYA

SEQ ID NO: 226 - protein, 8 aa, Artificial Sequence
  Synthetic Polypeptide
GVTFSSYA

SEQ ID NO: 227 - protein, 8 aa, Artificial Sequence
  Synthetic Polypeptide
GVIFSSYA

SEQ ID NO: 228 - protein, 8 aa, Artificial Sequence
  Synthetic Polypeptide
GVTFSSYA

SEQ ID NO: 229 - protein, 8 aa, Artificial Sequence
  Synthetic Polypeptide
GGTFSSYA

SEQ ID NO: 230 - protein, 8 aa, Artificial Sequence
  Synthetic Polypeptide
GGTFSSYA

SEQ ID NO: 231 - protein, 8 aa, Artificial Sequence
  Synthetic Polypeptide
GGPFSSYA

SEQ ID NO: 232 - protein, 8 aa, Artificial Sequence
  Synthetic Polypeptide
GGIFSSYA

SEQ ID NO: 233 - protein, 8 aa, Artificial Sequence
  Synthetic Polypeptide
GGIFRSYA

SEQ ID NO: 234 - protein, 8 aa, Artificial Sequence
  Synthetic Polypeptide
GGTFSSYA

SEQ ID NO: 235 - protein, 8 aa, Artificial Sequence
  Synthetic Polypeptide
GVTFSSYA

SEQ ID NO: 236 - protein, 8 aa, Artificial Sequence
  Synthetic Polypeptide
GGTFSSYA

SEQ ID NO: 237 - protein, 8 aa, Artificial Sequence
  Synthetic Polypeptide
GGTFRSYA

SEQ ID NO: 238 - protein, 8 aa, Artificial Sequence
  Synthetic Polypeptide
GGTFSSYA

SEQ ID NO: 239 - protein, 8 aa, Artificial Sequence
  Synthetic Polypeptide
GGPFSSYA

SEQ ID NO: 240 - protein, 8 aa, Artificial Sequence
  Synthetic Polypeptide
GVTFSSYA

SEQ ID NO: 241 - protein, 8 aa, Artificial Sequence
  Synthetic Polypeptide
GGTFSSYA

SEQ ID NO: 242 - protein, 8 aa, Artificial Sequence
  Synthetic Polypeptide
GVTFRSYA

SEQ ID NO: 243 - protein, 8 aa, Artificial Sequence
  Synthetic Polypeptide
GGTFSSYA

SEQ ID NO: 244 - protein, 8 aa, Artificial Sequence
  Synthetic Polypeptide
GVTFSSYA

SEQ ID NO: 245 - protein, 8 aa, Artificial Sequence
  Synthetic Polypeptide
GGPFSSYA

SEQ ID NO: 246 - protein, 8 aa, Artificial Sequence
  Synthetic Polypeptide
GGIFSSYA

SEQ ID NO: 247 - protein, 8 aa, Artificial Sequence
  Synthetic Polypeptide
IITIFGTA

SEQ ID NO: 248 - protein, 8 aa, Artificial Sequence
  Synthetic Polypeptide
ISPIFGTA

SEQ ID NO: 249 - protein, 8 aa, Artificial Sequence
  Synthetic Polypeptide
ISAIFGTA

SEQ ID NO: 250 - protein, 8 aa, Artificial Sequence
  Synthetic Polypeptide
ITPIFGTA

SEQ ID NO: 251 - protein, 8 aa, Artificial Sequence
  Synthetic Polypeptide
ISPIFGTA

SEQ ID NO: 252 - protein, 8 aa, Artificial Sequence
  Synthetic Polypeptide
ISPIFGTA

SEQ ID NO: 253 - protein, 8 aa, Artificial Sequence
  Synthetic Polypeptide
IITIFGTA

SEQ ID NO: 254 - protein, 8 aa, Artificial Sequence
  Synthetic Polypeptide
IIPIFGTA

SEQ ID NO: 255 - protein, 8 aa, Artificial Sequence
  Synthetic Polypeptide
ISPLFGTA

SEQ ID NO: 256 - protein, 8 aa, Artificial Sequence
  Synthetic Polypeptide
ISPMFGTA

SEQ ID NO: 257 - protein, 8 aa, Artificial Sequence
  Synthetic Polypeptide
IIPIFGTA

SEQ ID NO: 258 - protein, 8 aa, Artificial Sequence
  Synthetic Polypeptide
ISPVFGTA

SEQ ID NO: 259 - protein, 8 aa, Artificial Sequence
  Synthetic Polypeptide
IVPLFGTA

SEQ ID NO: 260 - protein, 8 aa, Artificial Sequence
  Synthetic Polypeptide
IIPIFGTA

SEQ ID NO: 261 - protein, 8 aa, Artificial Sequence
  Synthetic Polypeptide
ISPIFGTA

SEQ ID NO: 262 - protein, 8 aa, Artificial Sequence
  Synthetic Polypeptide
ISAIFGTA

SEQ ID NO: 263 - protein, 8 aa, Artificial Sequence
  Synthetic Polypeptide
IIPMFGTA

SEQ ID NO: 264 - protein, 8 aa, Artificial Sequence
  Synthetic Polypeptide
INPIFGTA

SEQ ID NO: 265 - protein, 8 aa, Artificial Sequence
  Synthetic Polypeptide
ISPMFGTA

SEQ ID NO: 266 - protein, 8 aa, Artificial Sequence
  Synthetic Polypeptide
ITPLFGTA

SEQ ID NO: 267 - protein, 8 aa, Artificial Sequence
  Synthetic Polypeptide
IMPIFGTA

SEQ ID NO: 268 - protein, 8 aa, Artificial Sequence
  Synthetic Polypeptide
ISPMFGTA

SEQ ID NO: 269 - protein, 8 aa, Artificial Sequence
  Synthetic Polypeptide
IIPIFGTA

SEQ ID NO: 270 - protein, 8 aa, Artificial Sequence
  Synthetic Polypeptide
ITPIFGTA

SEQ ID NO: 271 - protein, 8 aa, Artificial Sequence
  Synthetic Polypeptide
ISPMFGTA

SEQ ID NO: 272 - protein, 8 aa, Artificial Sequence
  Synthetic Polypeptide
ISGIFGTA

SEQ ID NO: 273 - protein, 8 aa, Artificial Sequence
  Synthetic Polypeptide
ISPIFGTA

SEQ ID NO: 274 - protein, 8 aa, Artificial Sequence
  Synthetic Polypeptide
ISPMFGTA

SEQ ID NO: 275 - protein, 8 aa, Artificial Sequence
  Synthetic Polypeptide
ISPMFGTA

SEQ ID NO: 276 - protein, 8 aa, Artificial Sequence
  Synthetic Polypeptide
ISPIFGTA

SEQ ID NO: 277 - protein, 10 aa, Artificial Sequence
  Synthetic Polypeptide
ARGATGFYDV

SEQ ID NO: 278 - protein, 16 aa, Artificial Sequence
  Synthetic Polypeptide
ARGREYYASNGDSFDV

SEQ ID NO: 279 - protein, 20 aa, Artificial Sequence
  Synthetic Polypeptide
ARDLSRDSLNLPGSSPGYDL

SEQ ID NO: 280 - protein, 16 aa, Artificial Sequence
  Synthetic Polypeptide
ARGSGYYVAASGAFDV

SEQ ID NO: 281 - protein, 16 aa, Artificial Sequence
  Synthetic Polypeptide
ARSRGYAPGTSFHYDV

SEQ ID NO: 282 - protein, 14 aa, Artificial Sequence
  Synthetic Polypeptide
ARDQGGTRGNYFDV

SEQ ID NO: 283 - protein, 10 aa, Artificial Sequence
  Synthetic Polypeptide
ARGGGGRFDV

SEQ ID NO: 284 - protein, 10 aa, Artificial Sequence
  Synthetic Polypeptide
ARGGVYSFDV

SEQ ID NO: 285 - protein, 18 aa, Artificial Sequence
  Synthetic Polypeptide
ARGLGTYSPSLYPRGMDV

SEQ ID NO: 286 - protein, 15 aa, Artificial Sequence
  Synthetic Polypeptide
ARGRAYLSVRGSFDV

SEQ ID NO: 287 - protein, 10 aa, Artificial Sequence
  Synthetic Polypeptide
ARGGSGSFDV

SEQ ID NO: 288 - protein, 18 aa, Artificial Sequence
  Synthetic Polypeptide
ARSRGYTVSSLAGRYFDQ

SEQ ID NO: 289 - protein, 10 aa, Artificial Sequence
  Synthetic Polypeptide
ARGLGLYFDV

SEQ ID NO: 290 - protein, 15 aa, Artificial Sequence
  Synthetic Polypeptide
ARVRGGYGPYGDFDV

SEQ ID NO: 291 - protein, 16 aa, Artificial Sequence
  Synthetic Polypeptide
ARGRSYIVSVSPGFDV

SEQ ID NO: 292 - protein, 16 aa, Artificial Sequence
  Synthetic Polypeptide
ARDSGIASGYTAYMDY

SEQ ID NO: 293 - protein, 10 aa, Artificial Sequence
  Synthetic Polypeptide
ARGAGSTFDV

SEQ ID NO: 294 - protein, 14 aa, Artificial Sequence
  Synthetic Polypeptide
ARGESAYYSRNYDV

SEQ ID NO: 295 - protein, 16 aa, Artificial Sequence
  Synthetic Polypeptide
ARGGGYYPAGVGRYDV

SEQ ID NO: 296 - protein, 14 aa, Artificial Sequence
  Synthetic Polypeptide
ARGPTLYSPPVFDV

SEQ ID NO: 297 - protein, 16 aa, Artificial Sequence
  Synthetic Polypeptide
ARGAGVSAGPSWPFDV

SEQ ID NO: 298 - protein, 16 aa, Artificial Sequence
  Synthetic Polypeptide
ARSRGYNVAASFGFDV

SEQ ID NO: 299 - protein, 14 aa, Artificial Sequence
  Synthetic Polypeptide
ARGTDYSGYRGFDV

SEQ ID NO: 300 - protein, 9 aa, Artificial Sequence
  Synthetic Polypeptide
ARGGGVFDV

SEQ ID NO: 301 - protein, 15 aa, Artificial Sequence
  Synthetic Polypeptide
AREGGYSPGGVDFDY

SEQ ID NO: 302 - protein, 14 aa, Artificial Sequence
  Synthetic Polypeptide
ARSPAYYFGPNMDV

SEQ ID NO: 303 - protein, 18 aa, Artificial Sequence
  Synthetic Polypeptide
ARGPGYHPAGASGQFFDL

SEQ ID NO: 304 - protein, 16 aa, Artificial Sequence
  Synthetic Polypeptide
ARGRGYAPDALTNFDV

SEQ ID NO: 305 - protein, 18 aa, Artificial Sequence
  Synthetic Polypeptide
ARGYSYYPGGGGGRNFDY

SEQ ID NO: 306 - protein, 15 aa, Artificial Sequence
  Synthetic Polypeptide
ARSGGYYDYGVGYDQ

SEQ ID NO: 307 - protein, 8 aa, Artificial Sequence
  Synthetic Polypeptide
SSNIGSNT

SEQ ID NO: 308 - protein, 6 aa, Artificial Sequence
  Synthetic Polypeptide
NIATKS

SEQ ID NO: 309 - protein, 6 aa, Artificial Sequence
  Synthetic Polypeptide
NIATKS

SEQ ID NO: 310 - protein, 8 aa, Artificial Sequence
  Synthetic Polypeptide
INNVGDQG

SEQ ID NO: 311 - protein, 6 aa, Artificial Sequence
  Synthetic Polypeptide
NIGSKS

SEQ ID NO: 312 - protein, 8 aa, Artificial Sequence
  Synthetic Polypeptide
SNNVGNQG

SEQ ID NO: 313 - protein, 8 aa, Artificial Sequence
  Synthetic Polypeptide
TSNIGNNA

SEQ ID NO: 314 - protein, 8 aa, Artificial Sequence
  Synthetic Polypeptide
GSNVGSNV

SEQ ID NO: 315 - protein, 8 aa, Artificial Sequence
  Synthetic Polypeptide
SSNIGRND

SEQ ID NO: 316 - protein, 8 aa, Artificial Sequence
  Synthetic Polypeptide
SSNIGSNT

SEQ ID NO: 317 - protein, 8 aa, Artificial Sequence
  Synthetic Polypeptide
SSNLGSNY

SEQ ID NO: 318 - protein, 7 aa, Artificial Sequence
  Synthetic Polypeptide
ESLCSTC

SEQ ID NO: 319 - protein, 9 aa, Artificial Sequence
  Synthetic Polypeptide
TGAVTSGYY

SEQ ID NO: 320 - protein, 8 aa, Artificial Sequence
  Synthetic Polypeptide
SSNIGSHS

SEQ ID NO: 321 - protein, 9 aa, Artificial Sequence
  Synthetic Polypeptide
SSDVGGYNY

SEQ ID NO: 322 - protein, 6 aa, Artificial Sequence
  Synthetic Polypeptide
SLRTSY

SEQ ID NO: 323 - protein, 8 aa, Artificial Sequence
  Synthetic Polypeptide
SSNIGSNT

SEQ ID NO: 324 - protein, 8 aa, Artificial Sequence
  Synthetic Polypeptide
SSNVGNQG

SEQ ID NO: 325 - protein, 12 aa, Artificial Sequence
  Synthetic Polypeptide
QNVLYSSNNKNN

SEQ ID NO: 326 - protein, 9 aa, Artificial Sequence
  Synthetic Polypeptide
SGSVSTTNY

SEQ ID NO: 327 - protein, 8 aa, Artificial Sequence
  Synthetic Polypeptide
SNNVGKQG

SEQ ID NO: 328 - protein, 6 aa, Artificial Sequence
  Synthetic Polypeptide
QYIDRS

SEQ ID NO: 329 - protein, 9 aa, Artificial Sequence
  Synthetic Polypeptide
SGSVSSFNY

SEQ ID NO: 330 - protein, 8 aa, Artificial Sequence
  Synthetic Polypeptide
SSNIGNNA

SEQ ID NO: 331 - protein, 8 aa, Artificial Sequence
  Synthetic Polypeptide
SGSIASTY

SEQ ID NO: 332 - protein, 9 aa, Artificial Sequence
  Synthetic Polypeptide
SSNIGAGYD

SEQ ID NO: 333 - protein, 8 aa, Artificial Sequence
  Synthetic Polypeptide
SNNVGNQG

SEQ ID NO: 334 - protein, 12 aa, Artificial Sequence
  Synthetic Polypeptide
RSLFDSSDNKNY

SEQ ID NO: 335 - protein, 8 aa, Artificial Sequence
  Synthetic Polypeptide
SSNIGSNT

SEQ ID NO: 336 - protein, 8 aa, Artificial Sequence
  Synthetic Polypeptide
RSNIGSNT

SEQ ID NO: 337 - protein, 3 aa, Artificial Sequence
  Synthetic Polypeptide
SNN

SEQ ID NO: 338 - protein, 3 aa, Artificial Sequence
  Synthetic Polypeptide
HDS

SEQ ID NO: 339 - protein, 3 aa, Artificial Sequence
  Synthetic Polypeptide
RNS

SEQ ID NO: 340 - protein, 3 aa, Artificial Sequence
  Synthetic Polypeptide
GAS

SEQ ID NO: 341 - protein, 3 aa, Artificial Sequence
  Synthetic Polypeptide
YDS

SEQ ID NO: 342 - protein, 3 aa, Artificial Sequence
  Synthetic Polypeptide
RNN

SEQ ID NO: 343 - protein, 3 aa, Artificial Sequence
  Synthetic Polypeptide
SLN

SEQ ID NO: 344 - protein, 3 aa, Artificial Sequence
  Synthetic Polypeptide
RNN

SEQ ID NO: 345 - protein, 3 aa, Artificial Sequence
  Synthetic Polypeptide
GRD

SEQ ID NO: 346 - protein, 3 aa, Artificial Sequence
  Synthetic Polypeptide
SNN

SEQ ID NO: 347 - protein, 3 aa, Artificial Sequence
  Synthetic Polypeptide
RNS

SEQ ID NO: 348 - protein, 3 aa, Artificial Sequence
  Synthetic Polypeptide
GAT

SEQ ID NO: 349 - protein, 3 aa, Artificial Sequence
  Synthetic Polypeptide
STS

SEQ ID NO: 350 - protein, 3 aa, Artificial Sequence
  Synthetic Polypeptide
GNS

SEQ ID NO: 351 - protein, 3 aa, Artificial Sequence
  Synthetic Polypeptide
EVS

SEQ ID NO: 352 - protein, 3 aa, Artificial Sequence
  Synthetic Polypeptide
QST

SEQ ID NO: 353 - protein, 3 aa, Artificial Sequence
  Synthetic Polypeptide
SNN

SEQ ID NO: 354 - protein, 3 aa, Artificial Sequence
  Synthetic Polypeptide
RND

SEQ ID NO: 355 - protein, 3 aa, Artificial Sequence
  Synthetic Polypeptide
WAS

SEQ ID NO: 356 - protein, 3 aa, Artificial Sequence
  Synthetic Polypeptide
NTN

SEQ ID NO: 357 - protein, 3 aa, Artificial Sequence
  Synthetic Polypeptide
RNN

SEQ ID NO: 358 - protein, 3 aa, Artificial Sequence
  Synthetic Polypeptide
YAS

SEQ ID NO: 359 - protein, 3 aa, Artificial Sequence
  Synthetic Polypeptide
NTN

SEQ ID NO: 360 - protein, 3 aa, Artificial Sequence
  Synthetic Polypeptide
YDD

SEQ ID NO: 361 - protein, 3 aa, Artificial Sequence
  Synthetic Polypeptide
EDH

SEQ ID NO: 362 - protein, 3 aa, Artificial Sequence
  Synthetic Polypeptide
DNS

SEQ ID NO: 363 - protein, 3 aa, Artificial Sequence
  Synthetic Polypeptide
RNN

SEQ ID NO: 364 - protein, 3 aa, Artificial Sequence
  Synthetic Polypeptide
WAS

SEQ ID NO: 365 - protein, 3 aa, Artificial Sequence
  Synthetic Polypeptide
SNN

SEQ ID NO: 366 - protein, 3 aa, Artificial Sequence
  Synthetic Polypeptide
SNN

SEQ ID NO: 367 - protein, 11 aa, Artificial Sequence
  Synthetic Polypeptide
AAWDDSLNGPV

SEQ ID NO: 368 - protein, 12 aa, Artificial Sequence
  Synthetic Polypeptide
AAWDDSLSGPWV

SEQ ID NO: 369 - protein, 11 aa, Artificial Sequence
  Synthetic Polypeptide
SAWDSSLSDWV

SEQ ID NO: 370 - protein, 9 aa, Artificial Sequence
  Synthetic Polypeptide
QQYSSSPYT

SEQ ID NO: 371 - protein, 11 aa, Artificial Sequence
  Synthetic Polypeptide
QLWDHTNSHVV

SEQ ID NO: 372 - protein, 11 aa, Artificial Sequence
  Synthetic Polypeptide
SAWDNTVSGWV

SEQ ID NO: 373 - protein, 11 aa, Artificial Sequence
  Synthetic Polypeptide
EAWDDSLSGPV

SEQ ID NO: 374 - protein, 11 aa, Artificial Sequence
  Synthetic Polypeptide
AAWDDRLNGFV

SEQ ID NO: 375 - protein, 11 aa, Artificial Sequence
  Synthetic Polypeptide
AAWDASLMIYV

SEQ ID NO: 376 - protein, 11 aa, Artificial Sequence
  Synthetic Polypeptide
AAWDDSLNGYV

SEQ ID NO: 377 - protein, 11 aa, Artificial Sequence
  Synthetic Polypeptide
AAWDDSLNGVV

SEQ ID NO: 378 - protein, 9 aa, Artificial Sequence
  Synthetic Polypeptide
QQYGSSPQT

SEQ ID NO: 379 - protein, 9 aa, Artificial Sequence
  Synthetic Polypeptide
LLYYGGPWV

SEQ ID NO: 380 - protein, 11 aa, Artificial Sequence
  Synthetic Polypeptide
AAWDDGLSGWV

SEQ ID NO: 381 - protein, 11 aa, Artificial Sequence
  Synthetic Polypeptide
ASWDDSLNAYV

SEQ ID NO: 382 - protein, 11 aa, Artificial Sequence
  Synthetic Polypeptide
NSRGSGGNPYV

SEQ ID NO: 383 - protein, 11 aa, Artificial Sequence
  Synthetic Polypeptide
AAWDDSLNGRV

SEQ ID NO: 384 - protein, 11 aa, Artificial Sequence
  Synthetic Polypeptide
SAWDNSLSAWV

SEQ ID NO: 385 - protein, 9 aa, Artificial Sequence
  Synthetic Polypeptide
QQYYGKPFT

SEQ ID NO: 386 - protein, 10 aa, Artificial Sequence
  Synthetic Polypeptide
VLYMGRGIYV

SEQ ID NO: 387 - protein, 11 aa, Artificial Sequence
  Synthetic Polypeptide
SAWDSSLSVWV

SEQ ID NO: 388 - protein, 9 aa, Artificial Sequence
  Synthetic Polypeptide
HQTSSLPWT

SEQ ID NO: 389 - protein, 10 aa, Artificial Sequence
  Synthetic Polypeptide
ALYVGGGISV

SEQ ID NO: 390 - protein, 11 aa, Artificial Sequence
  Synthetic Polypeptide
AAWDDSLSGPV

SEQ ID NO: 391 - protein, 9 aa, Artificial Sequence
  Synthetic Polypeptide
QSFDASTLV

SEQ ID NO: 392 - protein, 11 aa, Artificial Sequence
  Synthetic Polypeptide
QSYDSSLSVVV

SEQ ID NO: 393 - protein, 11 aa, Artificial Sequence
  Synthetic Polypeptide
SAWDSSLSAWV

SEQ ID NO: 394 - protein, 11 aa, Artificial Sequence
  Synthetic Polypeptide
QQYFSSPPIFT

SEQ ID NO: 395 - protein, 11 aa, Artificial Sequence
  Synthetic Polypeptide
AAWDDSLKGRV

SEQ ID NO: 396 - protein, 8 aa, Artificial Sequence
  Synthetic Polypeptide
QSYDSSVV

SEQ ID NO: 397 - DNA, 372 bp, Artificial Sequence
  Synthetic Polynucleotide
caggttcaattagtgcagtctggtgctgaagtgaaaaagcccggctcaagtgttaaagtaagctgtaaggcgagcggtggcccattcagctcatacgccattagctgggtgcgacaggctcctggtcagggcctcgaatggatgggcggcattagcccaatgtttggcactgcaaattatgcccagaaatttcagggtagagtcacaattaccgcagacaagagcacctcaaccgcctacatggaactgagtagcctgcgttccgaagatacagctgtgtattactgtgcgcgcgacgacggttacgctcctagtggtggtctgcgtgagtttgacgtttggggccaggggaccttagtcactgtgtctagc

SEQ ID NO: 398 - DNA, 340 bp, Artificial Sequence
  Synthetic Polynucleotide
gacatccagatgacccagtctccagactccctggctgtgtctctgggcgagagggccaccatcaactgcaagtccagccggagtgttttatacagctccaacaacaagaactacttagcttggtaccaacaaaaaccgggacagcctcctaagttgctcatttattgggcttctacccgggaatccggggtccctgaccgattcagtggcagcgggtctgggacagatttcactctcaccatcagcagcctgcaggctgaagatgtggcggtttattactgtcagcaatattatagtggttcctggacattcggccaagggaccaaggtggaaatcaaac

SEQ ID NO: 399 - DNA, 363 bp, Artificial Sequence
  Synthetic Polynucleotide
caggttcaattagtgcagtctggtgctgaagtgaaaaagcccggctcaagtgttaaagtaagctgtaaggcgagcggaggcatctttagctcatacgccattagctgggtgcgacaggctcctggtcagggcctcgaatggatgggcggcattagccctatctttggcactgcaaattatgcccagaaatttcagggtagagtcacaattaccgcagataaaagcacgaataccgcctacatggaactgagtagcctgcgttccgaagatacagctgtgtattactgtgcgcgcggtcgtggtgcttacatgggtcctagtatggatgtgtggggccaggggaccttagtcactgtgtctagc

SEQ ID NO: 400 - DNA, 325 bp, Artificial Sequence
  Synthetic Polynucleotide
cagcctgtgctgactcagccaccctcggtgtcagtggccccaggacagacggccaggattacctgtgggggaaacaacattggaagtaaaagtgtgcactggtaccagcagaagccaggccaggcccctgtgctggtcgtctatgatgatagcgaccggccctcagggatccctgagcgattctctggctccaactctgggaacacggccaccctgaccatcagcagggtcgaggccggggatgaggccgactactactgtcaggtgtgggataggagtagtgatcatgtggtgttcggcggagggaccaagctgaccgtcctag

SEQ ID NO: 401 - DNA, 363 bp, Artificial Sequence
  Synthetic Polynucleotide
caggttcaattagtgcagtctggtgctgaagtgaaaaagcccggctcaagtgttaaagtaagctgtaaggcgagcggaggtaccttcagctcatacgccattagctgggtgcgacaggctcctggtcagggcctcgaatggatgggcggcatcagcccaatctttggcactgcaaattatgcccagaaatttcagggtagagtcacaattaccgcagataaaagcacgtcaactgtgtatatggaactgagtagcctgcgttccgaagatacagctgtgtattactgtgcgcgcggtgctcgttactacgctggtggttacttcgatgtgtggggccaggggaccttagtcactgtgtctagc

SEQ ID NO: 402 - protein, 325 aa, Artificial Sequence
  Synthetic Polynucleotide
GAAATTGTGCTGACTCAGTCTCCAGGCACCCTGTCTTTGTCTCCAGGGGAAAGAGCCACCCTCTCCTGCAGGGCCAGTCAGACTGTTAGCAACTACTTAGCCTGGTATCAGCAGAGACCTGGCCAGGCTCCCAGGCTCCTCATCTACGCTGCATCCACGCGGGCCACTGGTGTCCCAGCCAGGTTCAGTGGCAGCGGGTCTGGGACAGAGTTCACTCTCACCATCAGCAGCCTGCAATCTGAAGATTTTGCAATTTATTACTGTCAACAGTATGATAACTTGCCTCCGGTCACTTTCGGCCCTGGGACCACAGTGGATATCAAAC

SEQ ID NO: 403 - DNA, 375 bp, Artificial Sequence
  Synthetic Polynucleotide
caggttcaattagtgcagtctggtgctgaagtgaaaaagcccggctcaagtgttaaagtaagctgtaaggcgagcggtgttacctttagctcatacgccattagctgggtgcgacaggctcctggtcagggcctcgaatggatgggcggcatcagcccaatcttcggtactgcaaattatgcccagaaatttcagggtagagtcacaattaccgcagatcagagtaccaacactgtctacatggaactgagtagcctgcgttccgaagatacagctgtgtattactgtgcgcgcgacagtggtaattacgacggttacggtcctggtagtcgtttcgacgtgtggggccaggggaccttagtcactgtgtctagc

SEQ ID NO: 404 - DNA, 331 bp, Artificial Sequence
  Synthetic Polynucleotide
cagcctgggctgactcagccaccctcagcgtctgggacccccgggcagagggtcaccatctcttgttctggaagcagctccaacatcggaagtaatactgtaaactggtaccagcagctcccaggaacggcccccaaactcctcatctatagtaataatcagcggccctcaggggtccctgaccgattctctggctccaagtctggcacctcagcctccctggccatcagtgggctccagtctgaggatgaggctgattatttctgttcagcttgggatgacagcctgggtggcgaggtcttcggaactgggaccaaggtcaacgtcctag

SEQ ID NO: 405 - DNA, 363 bp, Artificial Sequence
  Synthetic Polynucleotide
caggttcaattagtgcagtctggtgctgaagtgaaaaagcccggctcaagtgttaaagtaagctgtaaggcgagcggagtgacctttagttcttacgccattagctgggtgcgacaggctcctggtcagggcctcgaatggatgggcggcattatgcctatgttcggcactgcaaattatgcccagaaatttcagggtagagtcacaattaccgcagataagagtacgagcactgcctatatggaactgagtagcctgcgttccgaagatacagctgtgtattactgtgcgcgcgagcgtggtagttggagtttcggttactttgatgtgtggggccaggggaccttagtcactgtgtctagc

SEQ ID NO: 406 - DNA, 325 bp, Artificial Sequence
  Synthetic Polynucleotide
ctgcctgtgctgactcagccaccctcgatgtcagcggccccaggacagacggccaggattacctgtgggggagaccacattggaagtaaaagtgtgcactggtaccagcggaagccgggccaggcccctgtgctggtcatctattctgacaccgaccggccctcagggatccctgagcggttctctggctccaactctgggaacacggccaccctgaccatcagcagggtcgaagccggggatgaggccgactatttctgtcaggtgtgggatagtagtaatgatcatccggtgttcggcggaggcaccaagctgaccgtcctag

SEQ ID NO: 407 - DNA, 363 bp, Artificial Sequence
  Synthetic Polynucleotide
caggttcaattagtgcagtctggtgctgaagtgaaaaagcccggctcaagtgttaaagtaagctgtaaggcgagcggagtgacctttagctcttacgccattagctgggtgcgacaggctcctggtcagggcctcgaatggatgggcggcatcagccctctgtttggcactgcaaattatgcccagaaatttcagggtagagtcacaattaccgcagacaaaagtacgagcaccgtgtatatggaactgagtagcctgcgttccgaagatacagctgtgtattactgtgcgcgcagtcgtacatacgctgacggtcgtacattcgacgtgtggggccaggggaccttagtcactgtgtctagc

SEQ ID NO: 408 - DNA, 331 bp, Artificial Sequence
  Synthetic Polynucleotide
cagtctgtgctgactcagccaccctccgcgtccgggtctcctggacagtcggtcaccatctcctgcactggaaccagtagtgacgttggtggttataaccatgtctcctggtaccaacagcacccaggcaaagcccccaaagtcctgatttatgacgtcagtaagcggccctcaggggtcccagatcgcttctctggctccaagtctggcaacacggcctccctgaccgtctctgggctccaggctgaggatgaggctgattattactgcacctcatatgcaggcagcaacagtttggtcttcggaactgggaccgaggtcaccgtcctag

SEQ ID NO: 409 - protein, 372 aa, Artificial Sequence
  Synthetic Polynucleotide
CAGGTTCAATTAGTGCAGTCTGGTGCTGAAGTGAAAAAGCCCGGCTCAAGTGTTAAAGTAAGCTGTAAGGCGAGCGGTGGCACTTTCAGTTCATACGCCATTAGCTGGGTGCGACAGGCTCCTGGTCAGGGCCTCGAATGGATGGGCGGCATCAGCCCAATCTTTGGTACTGCAAATTATGCCCAGAAATTTCAGGGTAGAGTCACAATTACCGCAGACAAGAGCACGAGCACTGCCTACATGGAACTGAGTAGCCTGCGTTCCGAAGATACAGCTGTGTATTACTGTGCGCGCGAGCTGGGTTACCTGGCTGGTAGTCCTAGTCCTGGTTTCGATTACTGGGGCCAGGGGACCTTAGTCACTGTGTCTAGC

SEQ ID NO: 410 - DNA, 328 bp, Artificial Sequence
  Synthetic Polynucleotide
cagtctgtgctgactcagccaccctccgcgtccgggtctcctggacagtcagtcaccatctcctgcactggaaccagcagtgacgttggtggttataactatgtctcctggtaccaacagcacccaggcaaagcccccaaactcatcatttatgaggtcactaagcggccctcaggggtccctgatcgcttctctggctccaagtctggcaacacggcctccctgaccgtcgctgggctccaggctgaggatgaggctgattattactgcagctcgtatgcaggcggcaagtgggtcttcggaactgggaccaaggtcaccgtcctag

SEQ ID NO: 411 - protein, 363 aa, Artificial Sequence
  Synthetic Polynucleotide
CAGGTTCAATTAGTGCAGTCTGGTGCTGAAGTGAAAAAGCCCGGCTCAAGTGTTAAAGTAAGCTGTAAGGCGAGCGGAGGCACTTTTAGCTCTTACGCCATTAGCTGGGTGCGACAGGCTCCTGGTCAGGGCCTCGAATGGATGGGCGGCATTAGCCCAATCTTCGGCACTGCAAATTATGCCCAGAAATTTCAGGGTAGAGTCACAATTACCGCAGACACCAGCACCTCAACCGCCTACATGGAACTGAGTAGCCTGCGTTCCGAAGATACAGCTGTGTATTACTGTGCGCGCAGTCGTCGTTACTGGGCTGACGGTGGTTTCGATTATTGGGGCCAGGGGACCTTAGTCACTGTGTCTAGC

SEQ ID NO: 412 - DNA, 331 bp, Artificial Sequence
  Synthetic Polynucleotide
ctgcctgtgctgactcagccaccctcagcgtctgggacccccgggcagagggtcaccatctcttgttctggaagcagctccaacatgggaagaaataccgtcaactggtaccggcacctcccagggacggcccccgaactcctcatctatgataatgatgagcgtccctcaggggtccctgaccgattctctggctccaagtctggcacctcagcctccctggccatcagtgggctccagtctgaagatgagggtcattattactgtgctgcgtgggatgacagcctgaatggtccggtgttcggcggagggaccaagctgaccgtcctgg

SEQ ID NO: 413 - protein, 366 aa, Artificial Sequence
  Synthetic Polynucleotide
CAGGTTCAATTAGTGCAGTCTGGTGCTGAAGTGAAAAAGCCCGGCTCAAGTGTTAAAGTAAGCTGTAAGGCGAGCGGAGGTACTTTTAGTTCTTACGCCATTAGCTGGGTGCGACAGGCTCCTGGTCAGGGCCTCGAATGGATGGGCGGCATTAGCCCTATGTTCGGTACTGCAAATTATGCCCAGAAATTTCAGGGTAGAGTCACAATTACCGCAGACAAAAGTACCAGCACTGCCTACATGGAACTGAGTAGCCTGCGTTCCGAAGATACAGCTGTGTATTACTGTGCGCGCGAGGGTGGTTACAGTCCTGGTGGTGTTGACTTCGACTACTGGGGCCAGGGGACCTTAGTCACTGTGTCTAGC

SEQ ID NO: 414 - DNA, 331 bp, Artificial Sequence
  Synthetic Polynucleotide
aattttatgctgactcagccccactctgtgtcggagtctccggggaagacggtaaccatctcctgcacccgcagcagtggcagcattgccagcacctatgtgcagtggtaccggcagcgcccgggcagtgcccccaccactgtgatctatgaggatcatcagagaccctctggggtccctgatcggttctccggctccctcgacagctcctccaactctgcctccctcaccatctctggactgaggactgaggacgcggcaacctactactgtcagtcttttgatgccagcactctggtgttcggcggcgggaccaagctgaccgtcctcg

SEQ ID NO: 415 - protein, 363 aa, Artificial Sequence
  Synthetic Polynucleotide
CAGGTTCAATTAGTGCAGTCTGGTGCTGAAGTGAAAAAGCCCGGCTCAAGTGTTAAAGTAAGCTGTAAGGCGAGCGGTGTTACTTTTAGTTCTTACGCCATTAGCTGGGTGCGACAGGCTCCTGGTCAGGGCCTCGAATGGATGGGCGGCATCAGCCCAATCTTTGGTACTGCAAATTATGCCCAGAAATTTCAGGGTAGAGTCACAATTACCGCAGACGAAAGTACGAATACTGTGTATATGGAACTGAGTAGCCTGCGTTCCGAAGATACAGCTGTGTATTACTGTGCGCGCGGTACAACATACAGTACAGCTCGTTACTTCGACGTTTGGGGCCAGGGGACCTTAGTCACTGTGTCTAGC

SEQ ID NO: 416 - DNA, 337 bp, Artificial Sequence
  Synthetic Polynucleotide
aattttatgctgactcagccccactctgtgtcggagtctccggggaagacggtaaccatctcctgcacccgcagaagtggcagcattgccagcaactatgtgcagtggtaccagcagcgcccgggcagtgcccccaccactgtgatctatgaggataaccaaagaccctctggggtccctgatcgcttctctggctccatcgacaggtcctccaactctgcctccctcaccatctctggactgaagactgaggacgaggctgactactactgtcagtcttatgacagcgacaatcatgaagtgatattcggcggagggaccaagctgaccgtcctag

SEQ ID NO: 417 - DNA, 363 bp, Artificial Sequence
  Synthetic Polynucleotide
caggttcaattagtgcagtctggtgctgaagtgaaaaagcccggctcaagtgttaaagtaagctgtaaggcgagcggagtgacttttcgttcatacgccattagctgggtgcgacaggctcctggtcagggcctcgaatggatgggcggcatcagcggtatctttggtactgcaaattatgcccagaaatttcagggtagagtcacaattaccgcagatgagagcacgtcaaccgcatatatggaactgagtagcctgcgttccgaagatacagctgtgtattactgtgcgcgcagtcctgcttactacttcggtcctaatatggacgtgtggggccaggggaccttagtcactgtgtctagc

SEQ ID NO: 418 - DNA, 334 bp, Artificial Sequence
  Synthetic Polynucleotide
cagtctgtgctgactcagccaccctcagtgtctggggccccagggcagagggtcaccatctcctgcactgggagcagctccaacatcggggcaggttatgatgtacactggtaccagcaacttccaggaacagtccccaaactcatcatctatgataatagcaatcggccctcaggggtccctgcccgattctctggctccaagtctggcacctcagcctccctggccatcagtgggctccagtctgaggatgaggccgcatattattgccagtcgtatgacagcagcctgagtgttgtggtattcggcggtgggaccaagctgtccgtcctag

SEQ ID NO: 419 - DNA, 369 bp, Artificial Sequence
  Synthetic Polynucleotide
caggttcaattagtgcagtctggtgctgaagtgaaaaagcccggctcaagtgttaaagtaagctgtaaggcgagcggaggcacttttagttcttacgccattagctgggtgcgacaggctcctggtcagggcctcgaatggatgggcggcatcagccctatgtttggtactgcaaattatgcccagaaatttcagggtagagtcacaattaccgcagacaaaagtacgagcactgcctacatggaactgagtagcctgcgttccgaagatacagctgtgtattactgtgcgcgcagtagtcgttacgctcctagtgacagtacaaattttgatcaatggggccaggggaccttagtcactgtgtctagc

SEQ ID NO: 420 - DNA, 334 bp, Artificial Sequence
  Synthetic Polynucleotide
aattttatgctgactcagccccactctgtgtcggagtctccggggaagacggtaaccatctcctgcaccggcagcagtggcagcattgccagcaactatgtgcagtggtaccagcagcgcccgggcagtgcccccaccactgtgatctatgaggataaccaaagaccctctggggtccctgatcggttctctggctccatcgacagctcctccaactctgcctccctcaccatctctggactgaagactgaggacgaggctgactactactgtcagtcttatgataccagcaatcggaaggttttcggcggagggaccaagctgaccgtcctag

SEQ ID NO: 421 - DNA, 363 bp, Artificial Sequence
  Synthetic Polynucleotide
caggttcaattagtgcagtctggtgctgaagtgaaaaagcccggctcaagtgttaaagtaagctgtaaggcgagcggtggcccatttagttcatacgccattagctgggtgcgacaggctcctggtcagggcctcgaatggatgggcggcattagcggtatctttggcactgcaaattatgcccagaaatttcagggtagagtcacaattaccgcagatgagagcacgtcaaccgcatatatggaactgagtagcctgcgttccgaagatacagctgtgtattactgtgcgcgcggtgaccgtttctacgttggtgagcgtttcgatgtgtggggccaggggaccttagtcactgtgtctagc

SEQ ID NO: 422 - DNA, 328 bp, Artificial Sequence
  Synthetic Polynucleotide
cagtctgtgctgactcagccaccctcggtgtcagtggccccaggacagacggccagaattacctgtgggggaaatgacattggaagtaaaagtgtccactggtaccagcagaagccaggccaggcccctgtgctggtcgtctatgatgatatcgaccggccctcagggatccctgagcgattctctggctccaactatggggacacggccaccctgaccatcagctgggtcgaggccggggatgaggccgactattactgtcaggtgtgggatactaatagtgatcccgtctttgtcttcggaagtgggaccaaggtcaccgtccttg

SEQ ID NO: 423 - protein, 375 aa, Artificial Sequence
  Synthetic Polynucleotide
CAGGTTCAATTAGTGCAGTCTGGTGCTGAAGTGAAAAAGCCCGGCTCAAGTGTTAAAGTAAGCTGTAAGGCGAGCGGTGGCACCTTCAGCTCTTACGCCATTAGCTGGGTGCGACAGGCTCCTGGTCAGGGCCTCGAATGGATGGGCGGCATTAGCCCAATCTTCGGTACTGCAAATTATGCCCAGAAATTTCAGGGTAGAGTCACAATTACCGCAGACCAGAGCACGAGCACTGCCTACATGGAACTGAGTAGCCTGCGTTCCGAAGATACAGCTGTGTATTACTGTGCGCGCGGTGGTGGTGTTGGTCGTATCTGGATCGCTGGTTACGGTTTCGATCAGTGGGGCCAGGGGACCTTAGTCACTGTGTCTAGC

SEQ ID NO: 424 - DNA, 331 bp, Artificial Sequence
  Synthetic Polynucleotide
cagactgtggtgactcaggagccatcgttctcagtgtcccctggagggacagttaccctcacttgtggcttgagctctggctcagtctccactagtaactaccccagctggtaccagcagaccccaggccagcctccacgcacgctcatctacagcacaaacactcgctcttctggggtccctgatcgcttctctggctccatccttgggaacaaagctgccctcaccatcacgggggcccaggcagatgatgaatctgattattactgtgtcctatatatgggtagtggcatttcgatgttcggcggagggaccaagttgaccgtcctag

SEQ ID NO: 425 - DNA, 375 bp, Artificial Sequence
  Synthetic Polynucleotide
caggttcaattagtgcagtctggtgctgaagtgaaaaagcccggctcaagtgttaaagtaagctgtaaggcgagcggtggtacttttagttcatacgccattagctgggtgcgacaggctcctggtcagggcctcgaatggatgggcggcattagcccaatctttggtactgcaaattatgcccagaaatttcagggtagagtcacaattaccgcagacgaaagcaccagcactgtgtacatggaactgagtagcctgcgttccgaagatacagctgtgtattactgtgcgcgcggtcctggttaccaccctgctggtgctagtggtcaattctttgatctttggggccaggggaccttagtcactgtgtctagc

SEQ ID NO: 426 - DNA, 331 bp, Artificial Sequence
  Synthetic Polynucleotide
tcctatgagctgactcagccaccctcggtgtccaaggacttgagacagaccgccacactcacctgcactgggaacagcaacaatgttggcaaccaaggagcagcttggctgcagcagcaccagggccaccctcccaaactcctatcctacaggaataaccaccggccctcagggatctcagacagatcatctgcatccaggtcaggagacacagcctccctgaccattactggactccagcctgaggacgaggctgactattactgctcagcatgggacagcagcctcagtgcttgggtgttcggcggagggaccaagctgaccgtcctag

SEQ ID NO: 427 - DNA, 369 bp, Artificial Sequence
  Synthetic Polynucleotide
caggttcaattagtgcagtctggtgctgaagtgaaaaagcccggctcaagtgttaaagtaagctgtaaggcgagcggtgtgaccttcagctcatacgccattagctgggtgcgacaggctcctggtcagggcctcgaatggatgggcggcattagccctatgtttggtactgcaaattatgcccagaaatttcagggtagagtcacaattaccgcagatgaaagcaccaacaccgcctatatggaactgagtagcctgcgttccgaagatacagctgtgtattactgtgcgcgcggtcgtggttacgctcctgacgctctgacaaattttgacgtttggggccaggggaccttagtcactgtgtctagc

SEQ ID NO: 428 - DNA, 346 bp, Artificial Sequence
  Synthetic Polynucleotide
gaaattgtgctgactcagtctccagactccctggctatgtctctgggcgagagggccaccgtcaactgcaagtccagccggagtcttttcgacagctccgacaataagaactacttagcttggtaccagaagaaaccaggacagcctcctcaattgctcatttactgggcatctacccgacaatccggggtccctgaccgattcagtggcagcgggtctgggacagatttcactctcaccatcagcagcctgcaggctgaagatgtggcagtttattactgtcagcaatattttagtagtcctcccatattcaccttcggccctgggaccaaagtggagatcaaac

SEQ ID NO: 429 - DNA, 366 bp, Artificial Sequence
  Synthetic Polynucleotide
caggttcaattagtgcagtctggtgctgaagtgaaaaagcccggctcaagtgttaaagtaagctgtaaggcgagcggagtgacttttagctcatacgccattagctgggtgcgacaggctcctggtcagggcctcgaatggatgggcggcattacccctatgtttggtactgcaaattatgcccagaaatttcagggtagagtcacaattaccgcagataaaagtacgagcaccgtctatatggaactgagtagcctgcgttccgaagatacagctgtgtattactgtgcgcgcggtcgtggttacatcgctgttgctggtgacatggacgtgtggggccaggggaccttagtcactgtgtctagc

SEQ ID NO: 430 - DNA, 340 bp, Artificial Sequence
  Synthetic Polynucleotide
gacatccagatgacccagtctccagactccctggctgtgtctctgggcgagagggccaccatcaactgcaagtccagtcggagtgttttatacagctccaacaataagaactacttagcttggtaccagcagaaagcaggacagcctcctaagctgctcatttactgggcatctacccgggaatccggggtccctgaccgattcagtggcagcgggtctgggacagatttcactctcaccatcagcagcctgcaggctgaagatgtggcagtttattactgtcagcaatattatagtactcctccgacgttcggccaagggaccaaggtggaaatcaaac

SEQ ID NO: 431 - DNA, 372 bp, Artificial Sequence
  Synthetic Polynucleotide
caggttcaattagtgcagtctggtgctgaagtgaaaaagcccggctcaagtgttaaagtaagctgtaaggcgagcggtgttaccttcagttcatacgccattagctgggtgcgacaggctcctggtcagggcctcgaatggatgggcggcattagcccactgttcggtactgcaaattatgcccagaaatttcagggtagagtcacaattaccgcagataagagcacgagcactgcctacatggaactgagtagcctgcgttccgaagatacagctgtgtattactgtgcgcgcggtgacgcttactacgttggtggtggtgctcgtccttttgacctctggggccaggggaccttagtcactgtgtctagc

SEQ ID NO: 432 - DNA, 334 bp, Artificial Sequence
  Synthetic Polynucleotide
tcctatgagctgactcagccaccctcagtgtctgagacccccgggcagaacgtcattatctcttgttctggaggcagctccaacatcggagttaattatgtatactggtatcaggtggtcccaggagcggcccccaaactcctcatctataggaataatcagcggccctcaggggtccctgaccgattctctggctccaagtctggcacctcagcctccctggccatcagtggactccagtctgaggatgaggctgactattactgtggagtatgggatgacagcctgaatggtcattgggtgttcggcggagggaccgacctgaccgtcctgg

SEQ ID NO: 433 - DNA, 375 bp, Artificial Sequence
  Synthetic Polynucleotide
caggttcaattagtgcagtctggtgctgaagtgaaaaagcccggctcaagtgttaaagtaagctgtaaggcgagcggtggtccatttagctcatacgccattagctgggtgcgacaggctcctggtcagggcctcgaatggatgggcggcattagccctatgtttggtactgcaaattatgcccagaaatttcagggtagagtcacaattaccgcagatgaaagcacgtcaaccgtgtacatggaactgagtagcctgcgttccgaagatacagctgtgtattactgtgcgcgcggttacagttactaccctggtggtggtggtggtcgtaatttcgactactggggccaggggaccttagtcactgtgtctagc

SEQ ID NO: 434 - DNA, 331 bp, Artificial Sequence
  Synthetic Polynucleotide
ctgcctgtgctgactcagccaccctcagcgtctgggacccccgggcagagggtcaccatctcttgttctggaagcagctccaacatcggaagtaatactgtaaactggtaccagcagctcccaggaacggcccccaaactcctcatctatagtaataatcagcggccctcaggggtccctgaccgattctctggctccaagtctggcacctcagcctccctggccatcagtgggctccagtctgagggtgaggctgattattactgtgcagcatgggatgacagcctgaaaggtcgggtgttcggcggagggaccaaggtgaccgtcctag

SEQ ID NO: 435 - DNA, 372 bp, Artificial Sequence
  Synthetic Polynucleotide
caggttcaattagtgcagtctggtgctgaagtgaaaaagcccggctcaagtgttaaagtaagctgtaaggcgagcggaggtccattcagttcttacgccattagctgggtgcgacaggctcctggtcagggcctcgaatggatgggcggcatcagccctctgtttggtactgcaaattatgcccagaaatttcagggtagagtcacaattaccgcagatgaaagcacgtcaaccgcctacatggaactgagtagcctgcgttccgaagatacagctgtgtattactgtgcgcgcgctcctacatactacgctagtcgtgacagttacaatttcgattattggggccaggggaccttagtcactgtgtctagc

SEQ ID NO: 436 - DNA, 325 bp, Artificial Sequence
  Synthetic Polynucleotide
gaaacgacactcacgcagtctccagccaccctgtctgtgtctccaggggaaagagccaccctctcctgcagggccagtcagagtgttgacagaggctacttagcctggtatcagcagaagcctggccaggctcccaggctcctcatctatggtgcatcccacagggccgctggcatcccagacaggttcagtggcagtgggtctgggacagacttcactctcaccatcagcagactggagcctgaggattttgcagtatatttctgtcagcagtatggtagttcacgcctctctttcggcggagggaccaaggtggagatccaac

SEQ ID NO: 437 - DNA, 363 bp, Artificial Sequence
  Synthetic Polynucleotide
caggttcaattagtgcagtctggtgctgaagtgaaaaagcccggctcaagtgttaaagtaagctgtaaggcgagcggtgtgactttcagttcttacgccattagctgggtgcgacaggctcctggtcagggcctcgaatggatgggcggcattagccctatgttcggtactgcaaattatgcccagaaatttcagggtagagtcacaattaccgcagacaagagcacgaatactgcatatatggaactgagtagcctgcgttccgaagatacagctgtgtattactgtgcgcgcgacacaacatacatcgctggtggtcacttcgacgtttggggccaggggaccttagtcactgtgtctagc

SEQ ID NO: 438 - DNA, 331 bp, Artificial Sequence
  Synthetic Polynucleotide
cagtctgtgctgactcagccaccctccgcgtccgggtctcctggacagtcagtcaccatctcctgcactggaaccagcagtgacattggtgcttataactatgtctcctggtaccaacaacacccagacaaagcccccaagctcatcatttatgaggtcagtaagcggccctcaggggtccctgatcgcttctctggctccaagtctggcaacacggcctccctgaccgtctctgggctccaggctgaggatgaggctgattattactgcagctcctatgcaggcagcaacaatgtggtattcggcggagggaccaagctgaccgtcctag

SEQ ID NO: 439 - DNA, 366 bp, Artificial Sequence
  Synthetic Polynucleotide
caggttcaattagtgcagtctggtgctgaagtgaaaaagcccggctcaagtgttaaagtaagctgtaaggcgagcggtggtaccttcagctcatacgccattagctgggtgcgacaggctcctggtcagggcctcgaatggatgggcggcatcagccctctgtttggcactgcaaattatgcccagaaatttcagggtagagtcacaattaccgcagatgagagtaccaatactgcctatatggaactgagtagcctgcgttccgaagatacagctgtgtattactgtgcgcgcgctagtggttacttcacaggttggggtacattcgactactggggccaggggaccttagtcactgtgtctagc

SEQ ID NO: 440 - DNA, 319 bp, Artificial Sequence
  Synthetic Polynucleotide
tcctatgagctgactcagccaccctcggtgtcagtgtccccaggacagacggccaggatcacctgctctggagatgcattgccaaagcaatatgcttattggtaccagcagaagccaggccaggcccctgtgctggtgatatataaagacagtgagaggccctcagggatccctgagcgattctctggctccaactctgggaacacagccactctgaccatcagcgggacccaggctttggatgaggctgactattactgtcaggcgtgggacagcagcactgctgtcttcggaactgggaccaaggtcaccgtcctag

SEQ ID NO: 441 - DNA, 363 bp, Artificial Sequence
  Synthetic Polynucleotide
caggttcaattagtgcagtctggtgctgaagtgaaaaagcccggctcaagtgttaaagtaagctgtaaggcgagcggaggtacttttagttcttacgccattagctgggtgcgacaggctcctggtcagggcctcgaatggatgggcggcatcagccctatctttggtactgcaaattatgcccagaaatttcagggtagagtcacaattaccgcagacaagagcacgagcaccgcctacatggaactgagtagcctgcgttccgaagatacagctgtgtattactgtgcgcgcggtcgttactactacacagttggtgtttatgacgtttggggccaggggaccttagtcactgtgtctagc

SEQ ID NO: 442 - DNA, 331 bp, Artificial Sequence
  Synthetic Polynucleotide
tcctatgagctgactcagccaccctcggtgtccaagggcttgagacagaccgccaccctcacctgcattggggacagcgacaatgttggcaaccaaggagtaggttggctgcagcagcaccagggccaccctcccaaactcctgtcctacagggataacacccggccctcaggcatctcagagagattctctgcatccaggtcaggaaacacagcctccctgaccattactggactccagcctgaggacgaggctgactattactgctcagcatgggacagcagcctcactgccgtggtgttcggcggagggaccaagctggccgtcctag

SEQ ID NO: 443 - DNA, 381 bp, Artificial Sequence
  Synthetic Polynucleotide
caggttcaattagtgcagtctggtgctgaagtgaaaaagcccggctcaagtgttaaagtaagctgtaaggcgagcggtgttaccttcagttcttacgccattagctgggtgcgacaggctcctggtcagggcctcgaatggatgggcggcattagccctatctttggcactgcaaattatgcccagaaatttcagggtagagtcacaattaccgcagataaaagtacctcaaccgtctacatggaactgagtagcctgcgttccgaagatacagctgtgtattactgtgcgcgcggtggtggttacagtgctgacggtggtgctggtaataatacaatcttcgacgtttggggccaggggaccttagtcactgtgtctagc

SEQ ID NO: 444 - DNA, 331 bp, Artificial Sequence
  Synthetic Polynucleotide
cagcctgtgctgactcagccaccctcggtgtccaagggcttgagacagaccgccacactcacctgtactgggaacaacaacaatgttggcaaccaaggagcagcctggctgcagcagcaccagggccaccctcccaaactcctatccgacaggaataacaaccggccctcagggatctcagagagattatctgcatccaggtcaggaaatacagcctccctgaccattactggactccaggctgaggacgaggctgactattactgctcagcatgggacagcagcctcagtgcttgggtgttcggcggagggaccaagctgaccgtcctaa

SEQ ID NO: 445 - DNA, 366 bp, Artificial Sequence
  Synthetic Polynucleotide
caggttcaattagtgcagtctggtgctgaagtgaaaaagcccggctcaagtgttaaagtaagctgtaaggcgagcggagttacttttagctcttacgccattagctgggtgcgacaggctcctggtcagggcctcgaatggatgggcggcattagccctctgtttggtactgcaaattatgcccagaaatttcagggtagagtcacaattaccgcagatgagagtacctcaactgcatatatggaactgagtagcctgcgttccgaagatacagctgtgtattactgtgcgcgcgagcgtggttacacagttggtggtggtggtatggacgtgtggggccaggggaccttagtcactgtgtctagc

SEQ ID NO: 446 - DNA, 334 bp, Artificial Sequence
  Synthetic Polynucleotide
cagtctgccctgactcagcctccctccgcgtccgggtctcctggacagtcagtcaccatctcctgcactggaaccagcagtgacgttggtgctcacaactttgtctcctggtaccaacaacacccagacaaagcccccaaactcatcatttatgaggtcaataggcggccctcaggggtccctgatcgcttctctggctccaagtctggcacctcagcctccctggccatcagtggtctccagtctgacgatgaggctgactattactgtgcagcatgggacgacagtctcgatggtccggtgttcggcggagggaccaagctgaccgtcctag

SEQ ID NO: 447 - DNA, 372 bp, Artificial Sequence
  Synthetic Polynucleotide
caggttcaattagtgcagtctggtgctgaagtgaaaaagcccggctcaagtgttaaagtaagctgtaaggcgagcggagttacttttagctcatacgccattagctgggtgcgacaggctcctggtcagggcctcgaatggatgggcggcatcagcccaatctttggtactgcaaattatgcccagaaatttcagggtagagtcacaattaccgcagacaagagcacgaacactgtgtacatggaactgagtagcctgcgttccgaagatacagctgtgtattactgtgcgcgcgagtacctgggtgacgactacagtagtggtagttacttcgatgtgtggggccaggggaccttagtcactgtgtctagc

SEQ ID NO: 448 - DNA, 322 bp, Artificial Sequence
  Synthetic Polynucleotide
gaaacgacactcacgcagtctccaggcacactgtctttgtctccaggggaaacagccatcctctcctgtagggccagtcagagtgttgatagtcacttagcctggtaccaacaaaaaggtggccaggctcccaggctcctcatctatggtgcatccaccagggccactggtatcccagccaggttcagtggcagtgggtctgggacagacttcactctcaccatcaatggcctagagcctgaggattttgcaatttatttctgtcagcagcgcagcatgtggcccctcactttcggcggagggaccaaggtggagatcaaac

SEQ ID NO: 449 - DNA, 363 bp, Artificial Sequence
  Synthetic Polynucleotide
caggttcaattagtgcagtctggtgctgaagtgaaaaagcccggctcaagtgttaaagtaagctgtaaggcgagcggaggtactttcagttcatacgccattagctgggtgcgacaggctcctggtcagggcctcgaatggatgggcggcattagccctatgtttggtactgcaaattatgcccagaaatttcagggtagagtcacaattaccgcagacaaaagtacctcaactgcatatatggaactgagtagcctgcgttccgaagatacagctgtgtattactgtgcgcgcgagagtggttacagtggtacaggtcaatttgacgtgtggggccaggggaccttagtcactgtgtctagc

SEQ ID NO: 450 - DNA, 331 bp, Artificial Sequence
  Synthetic Polynucleotide
cagtctgtgctgactcagccaccctcagcgtctgggaccgccgggcagagggtcacaatctcctgttttgggagaacctccaacgtcggacgaaacactgttaactggtaccaacaattgcccggagcggcccccaagatcctcatttttaacgataatcaacggccctcgggggtccctgaccgcttctctggctccaagtctggcaccgccgcctccctgaccataagtaggctccagtccgcggatgaggctgattactattgttcatcatgggatgacgacctgaacggtccggtcttcggcggagggaccaagctgagcgtcgtag

SEQ ID NO: 451 - DNA, 366 bp, Artificial Sequence
  Synthetic Polynucleotide
caggttcaattagtgcagtctggtgctgaagtgaaaaagcccggctcaagtgttaaagtaagctgtaaggcgagcggaggtatctttagttcttacgccattagctgggtgcgacaggctcctggtcagggcctcgaatggatgggcggcattagcccaatcttcggtactgcaaattatgcccagaaatttcagggtagagtcacaattaccgcagatgagagcacgaacaccgcctatatggaactgagtagcctgcgttccgaagatacagctgtgtattactgtgcgcgcagtggtggttactacgactacggtgttggttacgaccaatggggccaggggaccttagtcactgtgtctagc

SEQ ID NO: 452 - DNA, 322 bp, Artificial Sequence
  Synthetic Polynucleotide
cagcctgtgctgactcagccaccctcagcgtctgggacccccgggcagagggtcaccatctcttgttctggaggcaggtccaacatcggaagtaatactgttaactggtaccagcagctcccaggaacggcccccaaactcctcatctatagtaataatcaccggccctcaggggtccctgatcgcttctctggctccaagtctggcaacacggcctccctgaccatctctgggctccaggcggaggatgaggctgattattactgccagtcctatgacagcagcgttgtattcggcggagggaccaagctgaccgtcctag

SEQ ID NO: 453 - DNA, 366 bp, Artificial Sequence
  Synthetic Polynucleotide
caggttcaattagtgcagtctggtgctgaagtgaaaaagcccggctcaagtgttaaagtaagctgtaaggcgagcggtggtaccttcagctcttacgccattagctgggtgcgacaggctcctggtcagggcctcgaatggatgggcggcattacccctatctttggcactgcaaattatgcccagaaatttcagggtagagtcacaattaccgcagacgagagtaccagcactgcctacatggaactgagtagcctgcgttccgaagatacagctgtgtattactgtgcgcgcagtggtggttacagtcctagtatcggtggtttcgacgtttggggccaggggaccttagtcactgtgtctagc

SEQ ID NO: 454 - DNA, 331 bp, Artificial Sequence
  Synthetic Polynucleotide
cagcctgggctgactcagccaccctcagcgtctgggacccccgggcagagggtcaccatctcttgttctggaagcaggtccaatatcggaagaaatactgtaaactggtaccagcaactcccaggaacggcccccaaactcctcatctatagtaacaatcagcggccctcaggggtccctgaccgagtctctggctccaagtctggcacctcagcctccctggccatcagtgggctccagtctgaggatgaggctgattattactgtgcagcatgggatgtgagcctgaatggtcaggtcttcggaactgggaccaaggtcaccgtcctag

SEQ ID NO: 455 - DNA, 369 bp, Artificial Sequence
  Synthetic Polynucleotide
caggttcaattagtgcagtctggtgctgaagtgaaaaagcccggctcaagtgttaaagtaagctgtaaggcgagcggaggtacctttagttcatacgccattagctgggtgcgacaggctcctggtcagggcctcgaatggatgggcggcatcagcccaatctttggtactgcaaattatgcccagaaatttcagggtagagtcacaattaccgcagatcgcagtacgagcaccgcctacatggaactgagtagcctgcgttccgaagatacagctgtgtattactgtgcgcgcggtcctggttacgaccctagtagtctgcgtggttttgacgtttggggccaggggaccttagtcactgtgtctagc

SEQ ID NO: 456 - DNA, 330 bp, Artificial Sequence
  Synthetic Polynucleotide
tcctatgagctgactcagccaccctcggtgtccaaggacttgagacagaccgccacactcacctgcactgggaacagcaacaatgttggcaaccaaggagcagcttggctgcagcagcaccagggccaccctcccaaactcctattctacaagaataacaaccggccctcagggatttcagagagattatctgcatccaggtcaggaaacacagcctccctgaccattactggactccagcctgaggacgaggctgactattactgctcagcatgggacagcagcctcagtgattgggtgttcggcggagggaccaagctgaccgtccta

SEQ ID NO: 457 - DNA, 351 bp, Artificial Sequence
  Synthetic Polynucleotide
caggttcaattagtgcagtctggtgctgaagtgaaaaagcccggctcaagtgttaaagtaagctgtaaggcgagcggtggcacttttagctcttacgccattagctgggtgcgacaggctcctggtcagggcctcgaatggatgggcggcatcattccaatctttggtactgcaaattatgcccagaaatttcagggtagagtcacaattaccgcagatgagagcacgaatactgcctacatggaactgagtagcctgcgttccgaagatacagctgtgtattactgtgcgcgcggtgaggaggcttactacgacctttggggccaggggaccttagtcactgtgtctagc

SEQ ID NO: 458 - DNA, 322 bp, Artificial Sequence
  Synthetic Polynucleotide
gaaattgtgttgacgcagtctccaggcaccctgtctttgtctccaggggaaagagccaccctctcctgctgggccagtcagagtgttagcagcttcttagcctggtaccaacacaaacctggccaggttcccaggctcctcatctatgatgcatccaatagggccactggcatcccagccaggttctctggcagtgggtctgggacacacttcactctcactatcagcagcctagagcctgaagattttgcagtttattactgtcagcagcgtttcaattggcctccgacgttcggccaagggaccaaggtggaaagcaaac

SEQ ID NO: 459 - DNA, 366 bp, Artificial Sequence
  Synthetic Polynucleotide
caggttcaattagtgcagtctggtgctgaagtgaaaaagcccggctcaagtgttaaagtaagctgtaaggcgagcggaggtacttttagttcatacgccattagctgggtgcgacaggctcctggtcagggcctcgaatggatgggcggcatcacccctatgttcggcactgcaaattatgcccagaaatttcagggtagagtcacaattaccgcagacaaaagtacgagcaccgcctatatggaactgagtagcctgcgttccgaagatacagctgtgtattactgtgcgcgcggtacaagttacctgcctggtcgtagtggttttgatgtttggggccaggggaccttagtcactgtgtctagc

SEQ ID NO: 460 - DNA, 322 bp, Artificial Sequence
  Synthetic Polynucleotide
cagcctgggctgactcagccaccctcggtgtcagtgtccccaggacagacggccaggatcacctgctctgcagatgcattgccaaagcaatatgcttattggtaccagcagaggccaggccaggcccctgtgttgctgatatataaagacactgagaggcccccagggatccctgagcgattctctggctccagctcagggacaacagtcacgttgaccatcagtggagtccaggcagaagacgaggctgactactattgtcaatcagcagacgctagtgaaaattctgtcttcggaggtgggaccaaggtcaccgtcctag

SEQ ID NO: 461 - DNA, 366 bp, Artificial Sequence
  Synthetic Polynucleotide
caggttcaattagtgcagtctggtgctgaagtgaaaaagcccggctcaagtgttaaagtaagctgtaaggcgagcggtgttacttttcgttcatacgccattagctgggtgcgacaggctcctggtcagggcctcgaatggatgggcggcatcagcgcaatgtttggtactgcaaattatgcccagaaatttcagggtagagtcacaattaccgcagacaagagtacgaacaccgcatatatggaactgagtagcctgcgttccgaagatacagctgtgtattactgtgcgcgcggtcgtggttacgaccctagtgttggtggttttgatgtgtggggccaggggaccttagtcactgtgtctagc

SEQ ID NO: 462 - DNA, 331 bp, Artificial Sequence
  Synthetic Polynucleotide
aattttatgctgactcagccccactctgtgtcggagtctccggggaagacggtcagcatctcctgcaccggcagcagtggcagcattgccagcaactatgtgcagtggtaccagcagcgcccgggcagtgcccccgccactgtgatctatgaggataaccaaagaccctctggggtccctgatcggttctctggctccatcgacagctcctccaactctgcctccctcaccatctctggactgaagactgaggacgaggctgactactactgtcagtcttatgataccagcaatctggtattcggcgtagggaccaagctgaccgtcctag

SEQ ID NO: 463 - DNA, 381 bp, Artificial Sequence
  Synthetic Polynucleotide
caggttcaattagtgcagtctggtgctgaagtgaaaaagcccggctcaagtgttaaagtaagctgtaaggcgagcggtggtacctttagttcatacgccattagctgggtgcgacaggctcctggtcagggcctcgaatggatgggcggcattattcctatcttcggtactgcaaattatgcccagaaatttcagggtagagtcacaattaccgcagacgatagcacgtcaaccgcatacatggaactgagtagcctgcgttccgaagatacagctgtgtattactgtgcgcgcgacagtacacctagtgttacaagtagtctgtaccgtatccctgcttttgatgtgtggggccaggggaccttagtcactgtgtctagc

SEQ ID NO: 464 - DNA, 337 bp, Artificial Sequence
  Synthetic Polynucleotide
ctgcctgtgctgactcaatcatcctctgcctctgcttccctgggatcctcggtcaagctcacctgcagtctgaccaatgggcccagtaactacatcatcgcatggcatcagcagcagccagagaagggccctcggtacttgatgaagcttaacagtgatggcagccacagcaagggggacgggatccctgatcgcttctcaggctccagctctggggctgagcgctacctcaccatctccaaccttaagtctgaggatgaggctgattattactgtgagacctgggacagtaacactcatgtggtattcggcggagggaccaagctgaccgtcctag

SEQ ID NO: 465 - DNA, 366 bp, Artificial Sequence
  Synthetic Polynucleotide
caggttcaattagtgcagtctggtgctgaagtgaaaaagcccggctcaagtgttaaagtaagctgtaaggcgagcggaggtacctttagttcatacgccattagctgggtgcgacaggctcctggtcagggcctcgaatggatgggcggcattaccccaatgtttggtactgcaaattatgcccagaaatttcagggtagagtcacaattaccgcagacaagagcacgtcaactacatacatggaactgagtagcctgcgttccgaagatacagctgtgtattactgtgcgcgcggtcctggttactaccctgacagtaataattatgatctctggggccaggggaccttagtcactgtgtctagc

SEQ ID NO: 466 - DNA, 325 bp, Artificial Sequence
  Synthetic Polynucleotide
gaaacgacactcacgcagtctccaggcaccctgtctttgtctccaggggaaagagccaccctctcctgcagggccagtcagagtgttagtagcagctacttagcctggtaccagcagaaacctggccaggctcccaggctcctcatctatggtgcatcaagtagggccactggcatcccagacaggttcagtggcagtgggtctgggacagacttcactctcaccatcagcagactggagcctgaagattttgcaacctactattgtcaacaggttaacagcttccctcgaacttttggccaggggaccaagctggagatgaaac

SEQ ID NO: 467 - DNA, 366 bp, Artificial Sequence
  Synthetic Polynucleotide
caggttcaattagtgcagtctggtgctgaagtgaaaaagcccggctcaagtgttaaagtaagctgtaaggcgagcggtgtgacctttagctcatacgccattagctgggtgcgacaggctcctggtcagggcctcgaatggatgggcggcattagcccaatgtttggcactgcaaattatgcccagaaatttcagggtagagtcacaattaccgcagaccagagcacgaacaccgcctatatggaactgagtagcctgcgttccgaagatacagctgtgtattactgtgcgcgcggtggtacatacagtcctggtggtacatactttgatgtttggggccaggggaccttagtcactgtgtctagc

SEQ ID NO: 468 - DNA, 331 bp, Artificial Sequence
  Synthetic Polynucleotide
cagcctgtgctgactcagccaccctcagcgtctgcgacccccggacagacggtgaccatctcttgttctggcagcagttccaacatcggcgtgagctttgtctactggtatcaacaatttccaggaacggcccccaagctcctcatttacagggatgatatgaggcagtcaggggtccctgaccgattttctggcttcaagtctggctcctcagcctccctgaccatctctgggctccagtccgaagatgaggccacttattattgttccgcgtgggatgagagcctgagtagtgtgttgttcggcggagggaccaaggtcaccgtcctag

SEQ ID NO: 469 - protein, 124 aa, Artificial Sequence
  Synthetic Polypeptide
QVQLVQSGAEVKKPGSSVKVSCKASGGPFSSYAISWVRQAPGQGLEWMGGISPMFGTANYAQKFQGRVTITADKSTSTAYMELSSLRSEDTAVYYCARDDGYAPSGGLREFDVWGQGTLVTVSS

SEQ ID NO: 470 - protein, 113 aa, Artificial Sequence
  Synthetic Polypeptide
DIQMTQSPDSLAVSLGERATINCKSSRSVLYSSNNKNYLAWYQQKPGQPPKLLIYWASTRESGVPDRFSGSGSGTDFTLTISSLQAEDVAVYYCQQYYSGSWTFGQGTKVEIK

SEQ ID NO: 471 - protein, 121 aa, Artificial Sequence
  Synthetic Polypeptide
QVQLVQSGAEVKKPGSSVKVSCKASGGIFSSYAISWVRQAPGQGLEWMGGISPIFGTANYAQKFQGRVTITADKSTNTAYMELSSLRSEDTAVYYCARGRGAYMGPSMDVWGQGTLVTVSS

SEQ ID NO: 472 - protein, 108 aa, Artificial Sequence
  Synthetic Polypeptide
QPVLTQPPSVSVAPGQTARITCGGNNIGSKSVHWYQQKPGQAPVLVVYDDSDRPSGIPERFSGSNSGNTATLTISRVEAGDEADYYCQVWDRSSDHVVFGGGTKLTVL

SEQ ID NO: 473 - protein, 121 aa, Artificial Sequence
  Synthetic Polypeptide
QVQLVQSGAEVKKPGSSVKVSCKASGGTFSSYAISWVRQAPGQGLEWMGGISPIFGTANYAQKFQGRVTITADKSTSTVYMELSSLRSEDTAVYYCARGARYYAGGYFDVWGQGTLVTVSS

SEQ ID NO: 474 - protein, 108 aa, Artificial Sequence
  Synthetic Polypeptide
EIVLTQSPGTLSLSPGERATLSCRASQTVSNYLAWYQQRPGQAPRLLIYAASTRATGVPARFSGSGSGTEFTLTISSLQSEDFAIYYCQQYDNLPPVTFGPGTTVDIK

SEQ ID NO: 475 - protein, 125 aa, Artificial Sequence
  Synthetic Polypeptide
QVQLVQSGAEVKKPGSSVKVSCKASGVTFSSYAISWVRQAPGQGLEWMGGISPIFGTANYAQKFQGRVTITADQSTNTVYMELSSLRSEDTAVYYCARDSGNYDGYGPGSRFDVWGQGTLVTVSS

SEQ ID NO: 476 - protein, 110 aa, Artificial Sequence
  Synthetic Polypeptide
QPGLTQPPSASGTPGQRVTISCSGSSSNIGSNTVNWYQQLPGTAPKLLIYSNNQRPSGVPDRFSGSKSGTSASLAISGLQSEDEADYFCSAWDDSLGGEVFGTGTKVNVL

SEQ ID NO: 477 - protein, 121 aa, Artificial Sequence
  Synthetic Polypeptide
QVQLVQSGAEVKKPGSSVKVSCKASGVTFSSYAISWVRQAPGQGLEWMGGIMPMFGTANYAQKFQGRVTITADKSTSTAYMELSSLRSEDTAVYYCARERGSWSFGYFDVWGQGTLVTVSS

SEQ ID NO: 478 - protein, 108 aa, Artificial Sequence
  Synthetic Polypeptide
LPVLTQPPSMSAAPGQTARITCGGDHIGSKSVHWYQRKPGQAPVLVIYSDTDRPSGIPERFSGSNSGNTATLTISRVEAGDEADYFCQVWDSSNDHPVFGGGTKLTVL

SEQ ID NO: 479 - protein, 121 aa, Artificial Sequence
  Synthetic Polypeptide
QVQLVQSGAEVKKPGSSVKVSCKASGVTFSSYAISWVRQAPGQGLEWMGGISPLFGTANYAQKFQGRVTITADKSTSTVYMELSSLRSEDTAVYYCARSRTYADGRTFDVWGQGTLVTVSS

SEQ ID NO: 480 - protein, 121 aa, Artificial Sequence; identical to SEQ ID NO: 479
  Synthetic Polypeptide

SEQ ID NO: 481 - protein, 124 aa, Artificial Sequence
  Synthetic Polypeptide
QVQLVQSGAEVKKPGSSVKVSCKASGGTFSSYAISWVRQAPGQGLEWMGGISPIFGTANYAQKFQGRVTITADKSTSTAYMELSSLRSEDTAVYYCARELGYLAGSPSPGFDYWGQGTLVTVSS

SEQ ID NO: 482 - protein, 109 aa, Artificial Sequence
  Synthetic Polypeptide
QSVLTQPPSASGSPGQSVTISCTGTSSDVGGYNYVSWYQQHPGKAPKLIIYEVTKRPSGVPDRFSGSKSGNTASLTVAGLQAEDEADYYCSSYAGGKWVFGTGTKVTVL

SEQ ID NO: 483 - protein, 121 aa, Artificial Sequence
  Synthetic Polypeptide
QVQLVQSGAEVKKPGSSVKVSCKASGGTFSSYAISWVRQAPGQGLEWMGGISPIFGTANYAQKFQGRVTITADTSTSTAYMELSSLRSEDTAVYYCARSRRYWADGGFDYWGQGTLVTVSS

SEQ ID NO: 484 - protein, 110 aa, Artificial Sequence
  Synthetic Polypeptide
LPVLTQPPSASGTPGQRVTISCSGSSSNMGRNTVNWYRHLPGTAPELLIYDNDERPSGVPDRFSGSKSGTSASLAISGLQSEDEGHYYCAAWDDSLNGPVFGGGTKLTVL

SEQ ID NO: 485 - protein, 122 aa, Artificial Sequence
  Synthetic Polypeptide
QVQLVQSGAEVKKPGSSVKVSCKASGGTFSSYAISWVRQAPGQGLEWMGGISPMFGTANYAQKFQGRVTITADKSTSTAYMELSSLRSEDTAVYYCAREGGYSPGGVDFDYWGQGTLVTVSS

SEQ ID NO: 486 - protein, 110 aa, Artificial Sequence
  Synthetic Polypeptide
NFMLTQPHSVSESPGKTVTISCTRSSGSIASTYVQWYRQRPGSAPTTVIYEDHQRPSGVPDRFSGSLDSSSNSASLTISGLRTEDAATYYCQSFDASTLVFGGGTKLTVL

SEQ ID NO: 487 - protein, 121 aa, Artificial Sequence
  Synthetic Polypeptide
QVQLVQSGAEVKKPGSSVKVSCKASGVTFSSYAISWVRQAPGQGLEWMGGISPIFGTANYAQKFQGRVTITADESTNTVYMELSSLRSEDTAVYYCARGTTYSTARYFDVWGQGTLVTVSS

SEQ ID NO: 488 - protein, 112 aa, Artificial Sequence
  Synthetic Polypeptide
NFMLTQPHSVSESPGKTVTISCTRRSGSIASNYVQWYQQRPGSAPTTVIYEDNQRPSGVPDRFSGSIDRSSNSASLTISGLKTEDEADYYCQSYDSDNHEVIFGGGTKLTVL

SEQ ID NO: 489 - protein, 121 aa, Artificial Sequence
  Synthetic Polypeptide
QVQLVQSGAEVKKPGSSVKVSCKASGVTFRSYAISWVRQAPGQGLEWMGGISGIFGTANYAQKFQGRVTITADESTSTAYMELSSLRSEDTAVYYCARSPAYYFGPNMDVWGQGTLVTVSS

SEQ ID NO: 490 - protein, 111 aa, Artificial Sequence
  Synthetic Polypeptide
QSVLTQPPSVSGAPGQRVTISCTGSSSNIGAGYDVHWYQQLPGTVPKLIIYDNSNRPSGVPARFSGSKSGTSASLAISGLQSEDEAAYYCQSYDSSLSVVVFGGGTKLSVL

SEQ ID NO: 491 - protein, 123 aa, Artificial Sequence
  Synthetic Polypeptide
QVQLVQSGAEVKKPGSSVKVSCKASGGTFSSYAISWVRQAPGQGLEWMGGISPMFGTANYAQKFQGRVTITADKSTSTAYMELSSLRSEDTAVYYCARSSRYAPSDSTNFDQWGQGTLVTVSS

SEQ ID NO: 492 - protein, 111 aa, Artificial Sequence
  Synthetic Polypeptide
NFMLTQPHSVSESPGKTVTISCTGSSGSIASNYVQWYQQRPGSAPTTVIYEDNQRPSGVPDRFSGSIDSSSNSASLTISGLKTEDEADYYCQSYDTSNRKVFGGGTKLTVL

SEQ ID NO: 493 - protein, 121 aa, Artificial Sequence
  Synthetic Polypeptide
QVQLVQSGAEVKKPGSSVKVSCKASGGPFSSYAISWVRQAPGQGLEWMGGISGIFGTANYAQKFQGRVTITADESTSTAYMELSSLRSEDTAVYYCARGDRFYVGERFDVWGQGTLVTVSS

SEQ ID NO: 494 - protein, 109 aa, Artificial Sequence
  Synthetic Polypeptide
QSVLTQPPSVSVAPGQTARITCGGNDIGSKSVHWYQQKPGQAPVLVVYDDIDRPSGIPERFSGSNYGDTATLTISWVEAGDEADYYCQVWDTNSDPVFVFGSGTKVTVL

SEQ ID NO: 495 - protein, 125 aa, Artificial Sequence
  Synthetic Polypeptide
QVQLVQSGAEVKKPGSSVKVSCKASGGTFSSYAISWVRQAPGQGLEWMGGISPIFGTANYAQKFQGRVTITADQSTSTAYMELSSLRSEDTAVYYCARGGGVGRIWIAGYGFDQWGQGTLVTVSS

SEQ ID NO: 496 - protein, 110 aa, Artificial Sequence
  Synthetic Polypeptide
QTVVTQEPSFSVSPGGTVTLTCGLSSGSVSTSNYPSWYQQTPGQPPRTLIYSTNTRSSGVPDRFSGSILGNKAALTITGAQADDESDYYCVLYMGSGISMFGGGTKLTVL

SEQ ID NO: 497 - protein, 125 aa, Artificial Sequence
  Synthetic Polypeptide
QVQLVQSGAEVKKPGSSVKVSCKASGGTFSSYAISWVRQAPGQGLEWMGGISPIFGTANYAQKFQGRVTITADESTSTVYMELSSLRSEDTAVYYCARGPGYHPAGASGQFFDLWGQGTLVTVSS

SEQ ID NO: 498 - protein, 110 aa, Artificial Sequence
  Synthetic Polypeptide
SYELTQPPSVSKDLRQTATLTCTGNSNNVGNQGAAWLQQHQGHPPKLLSYRNNHRPSGISDRSSASRSGDTASLTITGLQPEDEADYYCSAWDSSLSAWVFGGGTKLTVL

SEQ ID NO: 499 - protein, 123 aa, Artificial Sequence
  Synthetic Polypeptide
QVQLVQSGAEVKKPGSSVKVSCKASGVTFSSYAISWVRQAPGQGLEWMGGISPMFGTANYAQKFQGRVTITADESTNTAYMELSSLRSEDTAVYYCARGRGYAPDALTNFDVWGQGTLVTVSS

SEQ ID NO: 500 - protein, 115 aa, Artificial Sequence
  Synthetic Polypeptide
EIVLTQSPDSLAMSLGERATVNCKSSRSLFDSSDNKNYLAWYQKKPGQPPQLLIYWASTRQSGVPDRFSGSGSGTDFTLTISSLQAEDVAVYYCQQYFSSPPIFTFGPGTKVEIK

SEQ ID NO: 501 - protein, 122 aa, Artificial Sequence
  Synthetic Polypeptide
QVQLVQSGAEVKKPGSSVKVSCKASGVTFSSYAISWVRQAPGQGLEWMGGITPMFGTANYAQKFQGRVTITADKSTSTVYMELSSLRSEDTAVYYCARGRGYIAVAGDMDVWGQGTLVTVSS

SEQ ID NO: 502 - protein, 113 aa, Artificial Sequence
  Synthetic Polypeptide
DIQMTQSPDSLAVSLGERATINCKSSRSVLYSSNNKNYLAWYQQKAGQPPKLLIYWASTRESGVPDRFSGSGSGTDFTLTISSLQAEDVAVYYCQQYYSTPPTFGQGTKVEIK

SEQ ID NO: 503 - protein, 124 aa, Artificial Sequence
  Synthetic Polypeptide
QVQLVQSGAEVKKPGSSVKVSCKASGVTFSSYAISWVRQAPGQGLEWMGGISPLFGTANYAQKFQGRVTITADKSTSTAYMELSSLRSEDTAVYYCARGDAYYVGGGARPFDLWGQGTLVTVSS

SEQ ID NO: 504 - protein, 111 aa, Artificial Sequence
  Synthetic Polypeptide
SYELTQPPSVSETPGQNVIISCSGGSSNIGVNYVYWYQVVPGAAPKLLIYRNNQRPSGVPDRFSGSKSGTSASLAISGLQSEDEADYYCGVWDDSLNGHWVFGGGTDLTVL

SEQ ID NO: 505 - protein, 125 aa, Artificial Sequence
  Synthetic Polypeptide
QVQLVQSGAEVKKPGSSVKVSCKASGGPFSSYAISWVRQAPGQGLEWMGGISPMFGTANYAQKFQGRVTITADESTSTVYMELSSLRSEDTAVYYCARGYSYYPGGGGGRNFDYWGQGTLVTVSS

SEQ ID NO: 506 - protein, 110 aa, Artificial Sequence
  Synthetic Polypeptide
LPVLTQPPSASGTPGQRVTISCSGSSSNIGSNTVNWYQQLPGTAPKLLIYSNNQRPSGVPDRFSGSKSGTSASLAISGLQSEGEADYYCAAWDDSLKGRVFGGGTKVTVL

SEQ ID NO: 507 - protein, 124 aa, Artificial Sequence
  Synthetic Polypeptide
QVQLVQSGAEVKKPGSSVKVSCKASGGPFSSYAISWVRQAPGQGLEWMGGISPLFGTANYAQKFQGRVTITADESTSTAYMELSSLRSEDTAVYYCARAPTYYASRDSYNFDYWGQGTLVTVSS

SEQ ID NO: 508 - protein, 108 aa, Artificial Sequence
  Synthetic Polypeptide
ETTLTQSPATLSVSPGERATLSCRASQSVDRGYLAWYQQKPGQAPRLLIYGASHRAAGIPDRFSGSGSGTDFTLTISRLEPEDFAVYFCQQYGSSRLSFGGGTKVEIQ

SEQ ID NO: 509 - protein, 121 aa, Artificial Sequence
  Synthetic Polypeptide
QVQLVQSGAEVKKPGSSVKVSCKASGVTFSSYAISWVRQAPGQGLEWMGGISPMFGTANYAQKFQGRVTITADKSTNTAYMELSSLRSEDTAVYYCARDTTYIAGGHFDVWGQGTLVTVSS

SEQ ID NO: 510 - protein, 110 aa, Artificial Sequence
  Synthetic Polypeptide
QSVLTQPPSASGSPGQSVTISCTGTSSDIGAYNYVSWYQQHPDKAPKLIIYEVSKRPSGVPDRFSGSKSGNTASLTVSGLQAEDEADYYCSSYAGSNNVVFGGGTKLTVL

SEQ ID NO: 511 - protein, 122 aa, Artificial Sequence
  Synthetic Polypeptide
QVQLVQSGAEVKKPGSSVKVSCKASGGTFSSYAISWVRQAPGQGLEWMGGISPLFGTANYAQKFQGRVTITADESTNTAYMELSSLRSEDTAVYYCARASGYFTGWGTFDYWGQGTLVTVSS

SEQ ID NO: 512 - protein, 106 aa, Artificial Sequence
  Synthetic Polypeptide
SYELTQPPSVSVSPGQTARITCSGDALPKQYAYWYQQKPGQAPVLVIYKDSERPSGIPERFSGSNSGNTATLTISGTQALDEADYYCQAWDSSTAVFGTGTKVTVL

SEQ ID NO: 513 - protein, 121 aa, Artificial Sequence
  Synthetic Polypeptide
QVQLVQSGAEVKKPGSSVKVSCKASGGTFSSYAISWVRQAPGQGLEWMGGISPIFGTANYAQKFQGRVTITADKSTSTAYMELSSLRSEDTAVYYCARGRYYYTVGVYDVWGQGTLVTVSS

SEQ ID NO: 514 - protein, 110 aa, Artificial Sequence
  Synthetic Polypeptide
SYELTQPPSVSKGLRQTATLTCIGDSDNVGNQGVGWLQQHQGHPPKLLSYRDNTRPSGISERFSASRSGNTASLTITGLQPEDEADYYCSAWDSSLTAVVFGGGTKLAVL

SEQ ID NO: 515 - protein, 127 aa, Artificial Sequence
  Synthetic Polypeptide
QVQLVQSGAEVKKPGSSVKVSCKASGVTFSSYAISWVRQAPGQGLEWMGGISPIFGTANYAQKFQGRVTITADKSTSTVYMELSSLRSEDTAVYYCARGGGYSADGGAGNNTIFDVWGQGTLVTVSS

SEQ ID NO: 516 - protein, 110 aa, Artificial Sequence
  Synthetic Polypeptide
QPVLTQPPSVSKGLRQTATLTCTGNNNNVGNQGAAWLQQHQGHPPKLLSDRNNNRPSGISERLSASRSGNTASLTITGLQAEDEADYYCSAWDSSLSAWVFGGGTKLTVL

SEQ ID NO: 517 - protein, 122 aa, Artificial Sequence
  Synthetic Polypeptide
QVQLVQSGAEVKKPGSSVKVSCKASGVTFSSYAISWVRQAPGQGLEWMGGISPLFGTANYAQKFQGRVTITADESTSTAYMELSSLRSEDTAVYYCARERGYTVGGGGMDVWGQGTLVTVSS

SEQ ID NO: 518 - protein, 111 aa, Artificial Sequence
  Synthetic Polypeptide
QSALTQPPSASGSPGQSVTISCTGTSSDVGAHNFVSWYQQHPDKAPKLIIYEVNRRPSGVPDRFSGSKSGTSASLAISGLQSDDEADYYCAAWDDSLDGPVFGGGTKLTVL

SEQ ID NO: 519 - protein, 124 aa, Artificial Sequence
  Synthetic Polypeptide
QVQLVQSGAEVKKPGSSVKVSCKASGVTFSSYAISWVRQAPGQGLEWMGGISPIFGTANYAQKFQGRVTITADKSTNTVYMELSSLRSEDTAVYYCAREYLGDDYSSGSYFDVWGQGTLVTVSS

SEQ ID NO: 520 - protein, 107 aa, Artificial Sequence
  Synthetic Polypeptide
ETTLTQSPGTLSLSPGETAILSCRASQSVDSHLAWYQQKGGQAPRLLIYGASTRATGIPARFSGSGSGTDFTLTINGLEPEDFAIYFCQQRSMWPLTFGGGTKVEIK

SEQ ID NO: 521 - protein, 121 aa, Artificial Sequence
  Synthetic Polypeptide
QVQLVQSGAEVKKPGSSVKVSCKASGGTFSSYAISWVRQAPGQGLEWMGGISPMFGTANYAQKFQGRVTITADKSTSTAYMELSSLRSEDTAVYYCARESGYSGTGQFDVWGQGTLVTVSS

SEQ ID NO: 522 - protein, 110 aa, Artificial Sequence
  Synthetic Polypeptide
QSVLTQPPSASGTAGQRVTISCFGRTSNVGRNTVNWYQQLPGAAPKILIFNDNQRPSGVPDRFSGSKSGTAASLTISRLQSADEADYYCSSWDDDLNGPVFGGGTKLSVV

SEQ ID NO: 523 - protein, 122 aa, Artificial Sequence
  Synthetic Polypeptide
QVQLVQSGAEVKKPGSSVKVSCKASGGIFSSYAISWVRQAPGQGLEWMGGISPIFGTANYAQKFQGRVTITADESTNTAYMELSSLRSEDTAVYYCARSGGYYDYGVGYDQWGQGTLVTVSS

SEQ ID NO: 524 - protein, 107 aa, Artificial Sequence
  Synthetic Polypeptide
QPVLTQPPSASGTPGQRVTISCSGGRSNIGSNTVNWYQQLPGTAPKLLIYSNNHRPSGVPDRFSGSKSGNTASLTISGLQAEDEADYYCQSYDSSVVFGGGTKLTVL

SEQ ID NO: 525 - protein, 122 aa, Artificial Sequence
  Synthetic Polypeptide
QVQLVQSGAEVKKPGSSVKVSCKASGGTFSSYAISWVRQAPGQGLEWMGGITPIFGTANYAQKFQGRVTITADESTSTAYMELSSLRSEDTAVYYCARSGGYSPSIGGFDVWGQGTLVTVSS

SEQ ID NO: 526 - protein, 110 aa, Artificial Sequence
  Synthetic Polypeptide
QPGLTQPPSASGTPGQRVTISCSGSRSNIGRNTVNWYQQLPGTAPKLLIYSNNQRPSGVPDRVSGSKSGTSASLAISGLQSEDEADYYCAAWDVSLNGQVFGTGTKVTVL

SEQ ID NO: 527 - protein, 123 aa, Artificial Sequence
  Synthetic Polypeptide
QVQLVQSGAEVKKPGSSVKVSCKASGGTFSSYAISWVRQAPGQGLEWMGGISPIFGTANYAQKFQGRVTITADRSTSTAYMELSSLRSEDTAVYYCARGPGYDPSSLRGFDVWGQGTLVTVSS

SEQ ID NO: 528 - protein, 110 aa, Artificial Sequence
  Synthetic Polypeptide
SYELTQPPSVSKDLRQTATLTCTGNSNNVGNQGAAWLQQHQGHPPKLLFYKNNNRPSGISERLSASRSGNTASLTITGLQPEDEADYYCSAWDSSLSDWVFGGGTKLTVL

SEQ ID NO: 529 - protein, 117 aa, Artificial Sequence
  Synthetic Polypeptide
QVQLVQSGAEVKKPGSSVKVSCKASGGTFSSYAISWVRQAPGQGLEWMGGIIPIFGTANYAQKFQGRVTITADESTNTAYMELSSLRSEDTAVYYCARGEEAYYDLWGQGTLVTVSS

SEQ ID NO: 530 - protein, 107 aa, Artificial Sequence
  Synthetic Polypeptide
EIVLTQSPGTLSLSPGERATLSCWASQSVSSFLAWYQHKPGQVPRLLIYDASNRATGIPARFSGSGSGTHFTLTISSLEPEDFAVYYCQQRFNWPPTFGQGTKVESK

SEQ ID NO: 531 - protein, 122 aa, Artificial Sequence
  Synthetic Polypeptide
QVQLVQSGAEVKKPGSSVKVSCKASGGTFSSYAISWVRQAPGQGLEWMGGITPMFGTANYAQKFQGRVTITADKSTSTAYMELSSLRSEDTAVYYCARGTSYLPGRSGFDVWGQGTLVTVSS

SEQ ID NO: 532 - protein, 107 aa, Artificial Sequence
  Synthetic Polypeptide
QPGLTQPPSVSVSPGQTARITCSADALPKQYAYWYQQRPGQAPVLLIYKDTERPPGIPERFSGSSSGTTVTLTISGVQAEDEADYYCQSADASENSVFGGGTKVTVL

SEQ ID NO: 533 - protein, 122 aa, Artificial Sequence
  Synthetic Polypeptide
QVQLVQSGAEVKKPGSSVKVSCKASGVTFRSYAISWVRQAPGQGLEWMGGISAMFGTANYAQKFQGRVTITADKSTNTAYMELSSLRSEDTAVYYCARGRGYDPSVGGFDVWGQGTLVTVSS

SEQ ID NO: 534 - protein, 110 aa, Artificial Sequence
  Synthetic Polypeptide
NFMLTQPHSVSESPGKTVSISCTGSSGSIASNYVQWYQQRPGSAPATVIYEDNQRPSGVPDRFSGSIDSSSNSASLTISGLKTEDEADYYCQSYDTSNLVFGVGTKLTVL

SEQ ID NO: 535 - protein, 127 aa, Artificial Sequence
  Synthetic Polypeptide
QVQLVQSGAEVKKPGSSVKVSCKASGGTFSSYAISWVRQAPGQGLEWMGGIIPIFGTANYAQKFQGRVTITADDSTSTAYMELSSLRSEDTAVYYCARDSTPSVTSSLYRIPAFDVWGQGTLVTVSS

SEQ ID NO: 536 - protein, 112 aa, Artificial Sequence
  Synthetic Polypeptide
LPVLTQSSSASASLGSSVKLTCSLTNGPSNYIIAWHQQQPEKGPRYLMKLNSDGSHSKGDGIPDRFSGSSSGAERYLTISNLKSEDEADYYCETWDSNTHVVFGGGTKLTVL

SEQ ID NO: 537 - protein, 122 aa, Artificial Sequence
  Synthetic Polypeptide
QVQLVQSGAEVKKPGSSVKVSCKASGGTFSSYAISWVRQAPGQGLEWMGGITPMFGTANYAQKFQGRVTITADKSTSTTYMELSSLRSEDTAVYYCARGPGYYPDSNNYDLWGQGTLVTVSS

SEQ ID NO: 538 - protein, 108 aa, Artificial Sequence
  Synthetic Polypeptide
ETTLTQSPGTLSLSPGERATLSCRASQSVSSSYLAWYQQKPGQAPRLLIYGASSRATGIPDRFSGSGSGTDFTLTISRLEPEDFATYYCQQVNSFPRTFGQGTKLEMK

SEQ ID NO: 539 - protein, 122 aa, Artificial Sequence
  Synthetic Polypeptide
QVQLVQSGAEVKKPGSSVKVSCKASGVTFSSYAISWVRQAPGQGLEWMGGISPMFGTANYAQKFQGRVTITADQSTNTAYMELSSLRSEDTAVYYCARGGTYSPGGTYFDVWGQGTLVTVSS

SEQ ID NO: 540 - protein, 110 aa, Artificial Sequence
  Synthetic Polypeptide
QPVLTQPPSASATPGQTVTISCSGSSSNIGVSFVYWYQQFPGTAPKLLIYRDDMRQSGVPDRFSGFKSGSSASLTISGLQSEDEATYYCSAWDESLSSVLFGGGTKVTVL

SEQ ID NO: 541 - DNA, 351 bp, Artificial Sequence
  Synthetic Polynucleotide
caggttcaattagtgcagtctggtgctgaagtgaaaaagcccggctcaagtgttaaagtaagctgtaaggcgagcggaggtacttttagctcatacgccattagctgggtgcgacaggctcctggtcagggcctcgaatggatgggcggcattatcacaatctttggtactgcaaattatgcccagaaatttcagggtagagtcacaattaccgcagacaaaagtacctcaaccgcatacatggaactgagtagcctgcgttccgaagatacagctgtgtattactgtgcgcgcggtgctacaggtttctacgacgtttggggccaggggaccttagtcactgtgtctagc

SEQ ID NO: 542 - DNA, 331 bp, Artificial Sequence
  Synthetic Polynucleotide
ctgcctgtgctgactcagccaccctcagcgtctgggacccccgggcagagggtcaccatctcttgttctggaagcagctccaacatcggaagtaatactgtaaactggtaccagcagctcccaggaacggcccccaaactcctcatctatagtaataatcagcggccctcaggggtccctgaccgattctctggctccaagtctggcacctcagcctccctggccatcagtgggctccagtctgaggatgaggctgattattactgtgcagcatgggatgacagcctgaatggtccggtattcggcggagggaccaagctgaccgtcctag

SEQ ID NO: 543 - DNA, 369 bp, Artificial Sequence
  Synthetic Polynucleotide
caggttcaattagtgcagtctggtgctgaagtgaaaaagcccggctcaagtgttaaagtaagctgtaaggcgagcggagttactttcagctcatacgccattagctgggtgcgacaggctcctggtcagggcctcgaatggatgggcggcattagccctatcttcggcactgcaaattatgcccagaaatttcagggtagagtcacaattaccgcagatgaaagcacgtcaactgcatacatggaactgagtagcctgcgttccgaagatacagctgtgtattactgtgcgcgcggtcgtgagtactacgctagtaatggtgacagtttcgatgtttggggccaggggaccttagtcactgtgtctagc

SEQ ID NO: 544 - DNA, 328 bp, Artificial Sequence
  Synthetic Polynucleotide
cagcctgtgctgactcagccaccctcggtgtcagtggccccaggaaagacggccagcatttcctgtgagggaaacaacattgcgactaaaagtgtgcactggtaccagcagaagtcaggccacgcccctgtggtggtcgtctatcatgatagcgaccggccctcaggggtccctgaccgattctctggctccaagtctggcacctcagcctccctggccatcagtgggctccggtccgaggatgaggctgattattactgtgcagcatgggatgacagcctgagtggtccttgggtgttcggcggagggaccaagctgaccgtcctag

SEQ ID NO: 545 - DNA, 369 bp, Artificial Sequence
  Synthetic Polynucleotide
caggttcaattagtgcagtctggtgctgaagtgaaaaagcccggctcaagtgttaaagtaagctgtaaggcgagcggaggtacctttagttcatacgccattagctgggtgcgacaggctcctggtcagggcctcgaatggatgggcggcattagcgcaatcttcggcactgcaaattatgcccagaaatttcagggtagagtcacaattaccgcagatgagagcacgcgcaccgcatacatggaactgagtagcctgcgttccgaagatacagctgtgtattactgtgcgcgcggtagtggttactacgttgctgctagtggtgctttcgacgtgtggggccaggggaccttagtcactgtgtctagc

SEQ ID NO: 546 - DNA, 331 bp, Artificial Sequence
  Synthetic Polynucleotide
cagcctgggctgactcagccaccctcggtgtcaaagggcttgagacagaccgccacactcacctgcactgggaacatcaacaatgttggcgaccaaggagcaggttggctgcagcagcaccagggccgccctcccaaactcctgtcgtacaggaatagcaaccggccctcaggtgtctcagagagattctctgcatccaggtcaggaaatacagcctccctgaccattactggactccagcctgaggacgaggctgactattactgctcagcatgggacagcagcctcagtgattgggtgttcggcggagggaccaagctgaccgtcctag

SEQ ID NO: 547 - DNA, 381 bp, Artificial Sequence
  Synthetic Polynucleotide
caggttcaattagtgcagtctggtgctgaagtgaaaaagcccggctcaagtgttaaagtaagctgtaaggcgagcggtggcatcttcagctcatacgccattagctgggtgcgacaggctcctggtcagggcctcgaatggatgggcggcatcaccccaatcttcggcactgcaaattatgcccagaaatttcagggtagagtcacaattaccgcagacgaaagcacgcgtaccgcatatatggaactgagtagcctgcgttccgaagatacagctgtgtattactgtgcgcgcgacctgagtcgtgacagtctgaatctgcctggtagtagtcctggttacgatctctggggccaggggaccttagtcactgtgtctagc

SEQ ID NO: 548 - DNA, 322 bp, Artificial Sequence
  Synthetic Polynucleotide
gaaacgacactcacgcagtctccaggcaccctgtctttgtctccaggagaaagagccaccctctcctgcagggccagtcagagtgttagcagcaacttagcctggtaccagcagaaacctggccaggctcccaggctcctcatctatggtgcatccaccagggccactggtatcccagccaggttcagtggcagtgggtctgggacagagttcactctcaccatcagcagcctgcagtctgaagattttgcagtgtattactgtcagcagtatagtagttctccctacacttttggccaggggaccaaactggagatcaaac

SEQ ID NO: 549 - DNA, 369 bp, Artificial Sequence
  Synthetic Polynucleotide
caggttcaattagtgcagtctggtgctgaagtgaaaaagcccggctcaagtgttaaagtaagctgtaaggcgagcggagtgattttcagctcatacgccattagctgggtgcgacaggctcctggtcagggcctcgaatggatgggcggcattagccctatcttcggcactgcaaattatgcccagaaatttcagggtagagtcacaattaccgcagatgagagcacgtcaaccgcatatatggaactgagtagcctgcgttccgaagatacagctgtgtattactgtgcgcgcagtcgtggttacgctcctggtacaagtttccactacgatgtgtggggccaggggaccttagtcactgtgtctagc

SEQ ID NO: 550 - DNA, 325 bp, Artificial Sequence
  Synthetic Polynucleotide
ctgcctgtgctgactcaggcaccctcaatgtcagtggccccaggaaagacggccagtattacctgtgggggagacaacattggaagtaaaagtgtgcactggtaccagcagaagccaggccaggcccctgtgctggtcatgtattatgatagcgaccggccctcagggatccctgagcgattctctggctccaactctgggaacacggccaccctgaccatcagcagggtcgaggccggggatgaggccgactatttctgccagctgtgggatcatactaattctcatgtggtcttcggcggaaggaccaaactgaccgtcctag

SEQ ID NO: 551 - DNA, 363 bp, Artificial Sequence
  Synthetic Polynucleotide
caggttcaattagtgcagtctggtgctgaagtgaaaaagcccggctcaagtgttaaagtaagctgtaaggcgagcggtggcacctttagttcttacgccattagctgggtgcgacaggctcctggtcagggcctcgaatggatgggcggcattagcccaatctttggcactgcaaattatgcccagaaatttcagggtagagtcacaattacctcagatgagagtaccagcactgcatacatggaactgagtagcctgcgttccgaagatacagctgtgtattactgtgcgcgcgaccaaggtggtacacgtggtaattacttcgacgtttggggccaggggaccttagtcactgtgtctagc

SEQ ID NO: 552 - DNA, 331 bp, Artificial Sequence
  Synthetic Polynucleotide
cagcctgtgctgactcagccaccctcggtgtccaagggcttgagacagaccgccacagtcacctgcactgggaacagcaacaatgttggcaaccaaggagcagcttggctgcagcagcaccagggccaccctcccaaactcctatcctacaggaataacaaccggccctcagggatttcagagagattatctgcatccaggtcaggaaacacagcctccctgaccattgctggactccagcctgaggacgaggctgactattactgctcagcatgggacaacaccgtcagtggttgggtgttcggcggagggaccagggtgaccgtcctag

SEQ ID NO: 553 - DNA, 351 bp, Artificial Sequence
  Synthetic Polynucleotide
caggttcaattagtgcagtctggtgctgaagtgaaaaagcccggctcaagtgttaaagtaagctgtaaggcgagcggtggtactttcagttcatacgccattagctgggtgcgacaggctcctggtcagggcctcgaatggatgggcggcattatcacaatcttcggtactgcaaattatgcccagaaatttcagggtagagtcacaattaccgcagatgagagcacgaacaccgcctacatggaactgagtagcctgcgttccgaagatacagctgtgtattactgtgcgcgcggtggtggtggtcgttttgacgtttggggccaggggaccttagtcactgtgtctagc

SEQ ID NO: 554 - DNA, 331 bp, Artificial Sequence
  Synthetic Polynucleotide
tcctatgagctgactcagccaccctcagtgtctgggacccccgggcagagggtcaccatctcttgttctggaagcacctccaacatcggaaataatgctctaaactggtaccagaaactcccagggacggcccccaaactcctcatctatagtcttaatcagcgtccctcaggggtccctgaccgattctctggctccaagtctggcacctcagcctccctggccatcagtgggctccagtctgaggatgaggctgattattactgtgaagcatgggatgacagcctgagtggtccggtgttcggcggagggaccaaggtgaccgtcctag

SEQ ID NO: 555 - DNA, 351 bp, Artificial Sequence
  Synthetic Polynucleotide
caggttcaattagtgcagtctggtgctgaagtgaaaaagcccggctcaagtgttaaagtaagctgtaaggcgagcggaggtccatttcgctcatacgccattagctgggtgcgacaggctcctggtcagggcctcgaatggatgggcggcattatcccaatcttcggcactgcaaattatgcccagaaatttcagggtagagtcacaattaccgcagatgaaagtacgtcaactgcatacatggaactgagtagcctgcgttccgaagatacagctgtgtattactgtgcgcgcggtggtgtttacagttttgatgtgtggggccaggggaccttagtcactgtgtctagc

SEQ ID NO: 556 - DNA, 331 bp, Artificial Sequence
  Synthetic Polynucleotide
cagtctgggctgactcagccaccctcagcgtctgggacccccgggcagagggtcaccatttcttgttctggaagcggctccaacgtcggaagtaatgttgtaaattggtaccagcatctcccaggaacggcccccaaactcctcatctatcgtaataatcagcggccctcaggggtccctgaccgattctctggctccaagtctggcacctcagcctccctggccatcagtgggctccagtctgaggatgaggctgattattattgtgcagcatgggatgacagactgaatggctttgtctttggtactgggacgaaggtcaccgtcctga

SEQ ID NO: 557 - DNA, 375 bp, Artificial Sequence
  Synthetic Polynucleotide
caggttcaattagtgcagtctggtgctgaagtgaaaaagcccggctcaagtgttaaagtaagctgtaaggcgagcggtgttcctttcagttcttacgccattagctgggtgcgacaggctcctggtcagggcctcgaatggatgggcggcatcagcccactgtttggtactgcaaattatgcccagaaatttcagggtagagtcacaattaccgcagaccagagcacgtcaaccgtctacatggaactgagtagcctgcgttccgaagatacagctgtgtattactgtgcgcgcggtctgggtacatacagtcctagtctgtaccctcgtggtatggacgtttggggccaggggaccttagtcactgtgtctagc

SEQ ID NO: 558 - DNA, 331 bp, Artificial Sequence
  Synthetic Polynucleotide
ctgcctgtgctgactcagccaccctcagcgtctgggacccccggacagagtgtcaccatctcttgttctggaagcagctccaacatcggcagaaatgatgttaactggtaccagcaattcccgggaagggcccccaaactcctcatctatggtcgtgatgagcggcccttcggggtccctgcccgattctctggctccaagtctggcacctcagcctccctggccatcagtgggctccagtctgaggatgaggctgattattactgtgctgcatgggatgccagtctgatgatctatgtcttcggaactgggaccacggtcaccgtcctgg

SEQ ID NO: 559 - DNA, 366 bp, Artificial Sequence
  Synthetic Polynucleotide
caggttcaattagtgcagtctggtgctgaagtgaaaaagcccggctcaagtgttaaagtaagctgtaaggcgagcggagtgacctttagttcatacgccattagctgggtgcgacaggctcctggtcagggcctcgaatggatgggcggcatcagccctatgttcggcactgcaaattatgcccagaaatttcagggtagagtcacaattaccgcagacgaaagtacgaatactgtctatatggaactgagtagcctgcgttccgaagatacagctgtgtattactgtgcgcgcggtcgtgcttacctgagtgttcgtggtagtttcgacgtgtggggccaggggaccttagtcactgtgtctagc

SEQ ID NO: 560 - DNA, 331 bp, Artificial Sequence
  Synthetic Polynucleotide
tcctatgagctgactcagccaccctcagtgtctgggacccccgggcagagggtcaccatctcttgttctggaagcagctccaacatcggaagtaacactgtaaactggtaccagcagctcccaggaacggcccccaaactcctcatctatagtaataatcagcggccctcaggggtccctgaccgattctctggctccaagtctggcacctcagcctccctggccatcagtgggctccagtctgaggatgaggctgattattactgtgcagcatgggatgacagcctgaatggttatgtcttcggaactgggaccaaggtcaccgtcctag

SEQ ID NO: 561 - DNA, 351 bp, Artificial Sequence
  Synthetic Polynucleotide
caggttcaattagtgcagtctggtgctgaagtgaaaaagcccggctcaagtgttaaagtaagctgtaaggcgagcggtgtgattttcagttcttacgccattagctgggtgcgacaggctcctggtcagggcctcgaatggatgggcggcatcatcccaatctttggcactgcaaattatgcccagaaatttcagggtagagtcacaattaccgcagataaaagtacgtcaactgcctatatggaactgagtagcctgcgttccgaagatacagctgtgtattactgtgcgcgcggtggtagtggtagtttcgacgtttggggccaggggaccttagtcactgtgtctagc

SEQ ID NO: 562 - DNA, 331 bp, Artificial Sequence
  Synthetic Polynucleotide
cagcctgggctgactcagccaccctcagcgtctgggacccccgggcagagggtcaccatctcttgttctggaagcagttccaacctcggaagtaattatgtcttctggtaccagcacctcccaggagcggcccccaaactcctcatctatagaaatagtcagcggccctctggggtccctgaccgattctctggctccaagtctggcacctcagcctccctggccatcagtgggctccagtctgaggatgaggctgattattactgtgcagcatgggatgacagcctgaatggtgtggtattcggcggagggaccaagctgaccgtcctag

SEQ ID NO: 563 - DNA, 375 bp, Artificial Sequence
  Synthetic Polynucleotide
caggttcaattagtgcagtctggtgctgaagtgaaaaagcccggctcaagtgttaaagtaagctgtaaggcgagcggagtgactttcagctcttacgccattagctgggtgcgacaggctcctggtcagggcctcgaatggatgggcggcatcagccctgtgtttggtactgcaaattatgcccagaaatttcagggtagagtcacaattaccgcagatgatagtacgaataccgcctacatggaactgagtagcctgcgttccgaagatacagctgtgtattactgtgcgcgcagtcgtggttacacagttagtagtctggctggtcgttacttcgaccagtggggccaggggaccttagtcactgtgtctagc

SEQ ID NO: 564 - DNA, 325 bp, Artificial Sequence
  Synthetic Polynucleotide
gaaacgacactcacgcagtctccaggcaccctgtccttgtctccaggggaaagagcctccctctcctgcaaggccagtgagagtctttgcagcacttgcttggcctggtaccagcagaaacctggccaggctcccaggctcatcgtctatggtgcaaccagcagggccactggcatcccagacaggttcagtggcagtgggtctgggacagacttcactctcaccatcagcagactggagcctgaagattttgcagtgtattactgtcagcagtatggtagctcacctcagacgttcggccaagggaccaaggtggaaatcaaac

SEQ ID NO: 565 - DNA, 351 bp, Artificial Sequence
  Synthetic Polynucleotide
caggttcaattagtgcagtctggtgctgaagtgaaaaagcccggctcaagtgttaaagtaagctgtaaggcgagcggaggcacttttagctcatacgccattagctgggtgcgacaggctcctggtcagggcctcgaatggatgggcggcatcgtgccactgtttggcactgcaaattatgcccagaaatttcagggtagagtcacaattaccgcagacgaaagtaccagcactgcatatatggaactgagtagcctgcgttccgaagatacagctgtgtattactgtgcgcgcggtctgggtctgtactttgacgtgtggggccaggggaccttagtcactgtgtctagc

SEQ ID NO: 566 - DNA, 328 bp, Artificial Sequence
  Synthetic Polynucleotide
cagactgtggtgactcaggagccctcactgactgtgtccccaggagagacagtcactctcacctgtgcttccagcactggagcagtcaccagtggttactatccaaactggttccagcagaaacctggacaagcacccagggcactgatttatagtacaagcaacaaacactcctggacccctgcccggttctcaggctccctccttgggggcaaagctgccctgacactgtcaggtgtgcagcctgaggacgaggctgagtattattgtctgctctactatggtggtccttgggtgttcggcggagggaccaagttgaccgtcctgg

SEQ ID NO: 567 - DNA, 366 bp, Artificial Sequence
  Synthetic Polynucleotide
caggttcaattagtgcagtctggtgctgaagtgaaaaagcccggctcaagtgttaaagtaagctgtaaggcgagcggtggtactttcagctcatacgccattagctgggtgcgacaggctcctggtcagggcctcgaatggatgggcggcattatcccaatcttcggtactgcaaattatgcccagaaatttcagggtagagtcacaattaccgcagacgaaagcacgaacaccgcctacatggaactgagtagcctgcgttccgaagatacagctgtgtattactgtgcgcgcgttcgtggtggttacggtccttacggtgactttgacgtttggggccaggggaccttagtcactgtgtctagc

SEQ ID NO: 568 - DNA, 331 bp, Artificial Sequence
  Synthetic Polynucleotide
cagcctgggctgactcagccaccctcagcgtctgggacccccgggcagagggtcaccatctcttgttctggaagcagctccaacatcggaagtcattctgtgaactggtaccggcagctcccaggaacggccccccaactcctcatctatggtaacagcaatcggccctcaggggtccctgaccgattctctggctccaagtctggcacctcagcgtccctggccatcagtgggctccagtctgaggatgaggctgattatttctgtgcggcatgggatgacggcctgagtggttgggtgttcggcggagggaccaaattgaccgtcctag

SEQ ID NO: 569 - DNA, 369 bp, Artificial Sequence
  Synthetic Polynucleotide
caggttcaattagtgcagtctggtgctgaagtgaaaaagcccggctcaagtgttaaagtaagctgtaaggcgagcggtggcccttttagctcatacgccattagctgggtgcgacaggctcctggtcagggcctcgaatggatgggcggcattagcccaatcttcggcactgcaaattatgcccagaaatttcagggtagagtcacaattaccgcagataagagtacgaacaccgcatacatggaactgagtagcctgcgttccgaagatacagctgtgtattactgtgcgcgcggtcgtagttacatcgttagtgttagtcctggttttgacgtgtggggccaggggaccttagtcactgtgtctagc

SEQ ID NO: 570 - DNA, 334 bp, Artificial Sequence
  Synthetic Polynucleotide
cagtctgtgctgactcagccaccctccgcgtccgggtctcctggacagtcagtcaccatctcctgcactggaaccagcagtgacgttggtggttataactatgtctcctggtaccaacagtacccaggcaaagcccccaaactcatgatttatgaggtcagtaagcggccctcaggggtccctgatcgtttctctggctccaagtctggcacctcagcctccctggccatcagtgagctccaatctgaggatgaggctgattattactgtgcatcatgggatgacagcctgaatgcttatgtcttcggaagtgggaccaaggtcaccgtcctgg

SEQ ID NO: 571 - DNA, 369 bp, Artificial Sequence
  Synthetic Polynucleotide
caggttcaattagtgcagtctggtgctgaagtgaaaaagcccggctcaagtgttaaagtaagctgtaaggcgagcggaggcattttcagttcatacgccattagctgggtgcgacaggctcctggtcagggcctcgaatggatgggcggcatcagcgcaatctttggtactgcaaattatgcccagaaatttcagggtagagtcacaattaccgcagatgagagtaccagcaccgcatatatggaactgagtagcctgcgttccgaagatacagctgtgtattactgtgcgcgcgacagtggtatcgctagtggttacacagcttacatggattattggggccaggggaccttagtcactgtgtctagc

SEQ ID NO: 572 - DNA, 325 bp, Artificial Sequence
  Synthetic Polynucleotide
tcttctgagctgactcaggaccctgctgtgtctgtggccttgggacagacagtcaggatcacatgccaaggagacagcctcagaacctcttacgcaagctggtaccagcagaagccaggccagtcccctgtactggtcatctatcaaagtactaagcggccctcagggatccctgagcgattctctgcctccagctcaggaaacacagcttccctgaccatcactggggctcaggcggaagatgaggctgactattactgtaactcccggggcagcgggggtaacccctatgtcttcggaactgggaccaaggtcaccgtccttg

SEQ ID NO: 573 - DNA, 351 bp, Artificial Sequence
  Synthetic Polynucleotide
caggttcaattagtgcagtctggtgctgaagtgaaaaagcccggctcaagtgttaaagtaagctgtaaggcgagcggtggcattttccgttcatacgccattagctgggtgcgacaggctcctggtcagggcctcgaatggatgggcggcattatcccaatgttcggtactgcaaattatgcccagaaatttcagggtagagtcacaattaccgcagatgagagtacgactactgtctatatggaactgagtagcctgcgttccgaagatacagctgtgtattactgtgcgcgcggtgctggtagtacatttgatgtgtggggccaggggaccttagtcactgtgtctagc

SEQ ID NO: 574 - DNA, 331 bp, Artificial Sequence
  Synthetic Polynucleotide
cagtctgtgctgactcagccaccctcagcgtctgggacccccgggcagagggtcaccatctcttgttctggaagcagctccaacatcggaagtaatactgtaaactggtaccagcagctcccaggaacggcccccagactcctcatctatagtaataatcagcggccctcaggggtccctgaccgattctctggctccaagtctggcacctcagcctccctggccatcagtgggctccagtctgaggatgaggctgattattactgtgcagcatgggatgacagcctgaatggtcgggtgttcggcggagggaccaagctgaccgtcctag

SEQ ID NO: 575 - DNA, 363 bp, Artificial Sequence
  Synthetic Polynucleotide
caggttcaattagtgcagtctggtgctgaagtgaaaaagcccggctcaagtgttaaagtaagctgtaaggcgagcggtggtaccttcagctcatacgccattagctgggtgcgacaggctcctggtcagggcctcgaatggatgggcggcattaaccctatctttggtactgcaaattatgcccagaaatttcagggtagagtcacaattaccgcagatgagagcacgaatactgcctacatggaactgagtagcctgcgttccgaagatacagctgtgtattactgtgcgcgcggtgagagtgcttactacagtcgtaattacgatgtgtggggccaggggaccttagtcactgtgtctagc

SEQ ID NO: 576 - DNA, 331 bp, Artificial Sequence
  Synthetic Polynucleotide
tcctatgagctgactcagccaccctcggtgtccaagggcttgagacagaccgccacactcacctgcactgggaacagcagcaatgttggcaaccaaggagcatcttggctgcagcagcaccagggccaccctcccaaactcctatcctacaggaatgacaaccggccctcagggatctcagagagattctctgcatccaggtcaggaaatacagcctccctgaccattactggactccagcctgaggacgaggctgactattactgctcagcatgggacaacagcctcagtgcttgggtgttcggtggagggaccaagctgaccgtcctag

SEQ ID NO: 577 - DNA, 369 bp, Artificial Sequence
  Synthetic Polynucleotide
caggttcaattagtgcagtctggtgctgaagtgaaaaagcccggctcaagtgttaaagtaagctgtaaggcgagcggtgtgacttttagctcatacgccattagctgggtgcgacaggctcctggtcagggcctcgaatggatgggcggcatcagcccaatgttcggcactgcaaattatgcccagaaatttcagggtagagtcacaattaccgcagatgagagcacgaataccgcatatatggaactgagtagcctgcgttccgaagatacagctgtgtattactgtgcgcgcggtggtggttactaccctgctggtgttggtcgttatgatgtttggggccaggggaccttagtcactgtgtctagc

SEQ ID NO: 578 - DNA, 340 bp, Artificial Sequence
  Synthetic Polynucleotide
gacatcgtgatgacccagtctccagactccctggctgtgtctctgggcgagagggccaccatcaactgcaagtccagccagaatgttttatacagctccaacaataagaataacttagcttggtaccaacaaagaccaggacagcctcctaaagtgctcctttattgggcatctacccgggcatccggggtccctgaccgattcagtggcagcgggtctgggacagatttcactctcaccatcaacagccttcaggctgaagatgtggcactttattactgtcaacaatattatggtaaacccttcactttcggccctgggaccaaagtggagatcaaac

SEQ ID NO: 579 - DNA, 363 bp, Artificial Sequence
  Synthetic Polynucleotide
caggttcaattagtgcagtctggtgctgaagtgaaaaagcccggctcaagtgttaaagtaagctgtaaggcgagcggaggtacctttagctcatacgccattagctgggtgcgacaggctcctggtcagggcctcgaatggatgggcggcattacccctctgttcggcactgcaaattatgcccagaaatttcagggtagagtcacaattaccgcagacgatagtacgtcaactgcatatatggaactgagtagcctgcgttccgaagatacagctgtgtattactgtgcgcgcggtcctacactgtacagtcctcctgtttttgatgtgtggggccaggggaccttagtcactgtgtctagc

SEQ ID NO: 580 - DNA, 331 bp, Artificial Sequence
  Synthetic Polynucleotide
cagactgtggtgactcaggagccatcgttctcagtgtcccctggagggacaatcaccctcacttgtggcttgagttctggctcagtctctactactaattatcccagctggtaccagcagaccccaggccgaactccacgcacgctcatctacaacacaaacactcgctcttctggggtccctgatcgcttctctggctccatccttgggaacaaagctgccctcaccatcacgggggcccaggcaggtgatgaatctgattattactgtgttttatatatgggtcgtggcatttatgtcttcggaagtgggaccaaggtctccgtcctgg

SEQ ID NO: 581 - DNA, 369 bp, Artificial Sequence
  Synthetic Polynucleotide
caggttcaattagtgcagtctggtgctgaagtgaaaaagcccggctcaagtgttaaagtaagctgtaaggcgagcggaggcacttttcgctcttacgccattagctgggtgcgacaggctcctggtcagggcctcgaatggatgggcggcatcatgccaatctttggtactgcaaattatgcccagaaatttcagggtagagtcacaattaccgcagacgagagtacgacaaccgtgtacatggaactgagtagcctgcgttccgaagatacagctgtgtattactgtgcgcgcggtgctggtgttagtgctggtcctagttggccttttgacgtttggggccaggggaccttagtcactgtgtctagc

SEQ ID NO: 582 - DNA, 331 bp, Artificial Sequence
  Synthetic Polynucleotide
cagcctgggctgactcagccaccctcggtgtccaaggacttgaggcagaccgccacactcacctgcactgggaacagcaacaatgttggcaaacaaggagctacttggctgcagcagcaccagggccaccctcccaaactcctatcctacaggaataacaaccggccctcagggatctcagagagattctctgcatccaggtcaggagacacagcctccctgaccattactggcctccagcctgaggacgaggctgactattactgctcagcatgggacagcagcctcagtgtatgggtgttcggcggagggaccaagctgaccgtcctag

SEQ ID NO: 583 - DNA, 369 bp, Artificial Sequence
  Synthetic Polynucleotide
caggttcaattagtgcagtctggtgctgaagtgaaaaagcccggctcaagtgttaaagtaagctgtaaggcgagcggtggtaccttcagctcatacgccattagctgggtgcgacaggctcctggtcagggcctcgaatggatgggcggcattagccctatgtttggtactgcaaattatgcccagaaatttcagggtagagtcacaattaccgcagatgagagcacgtcaaccgtgtacatggaactgagtagcctgcgttccgaagatacagctgtgtattactgtgcgcgcagtcgtggttacaatgttgctgctagtttcggtttcgatgtgtggggccaggggaccttagtcactgtgtctagc

SEQ ID NO: 584 - DNA, 322 bp, Artificial Sequence
  Synthetic Polynucleotide
gaaattgtgttgacgcagtctccatccttcctgtctgcatctgtaggagacagagtcaccatcacttgccgggccagtcagtacattgatcgtagcttacactggtaccagcagaaaccagatcagtctccaaagctcctcatcaagtatgcttctcagtccatctcaggggtcccctcgaggttcagtggcagtggatctgggacagatttcagcctcaccatcaatagcctggaaactgaagatgctgcaacctattactgccatcagaccagtagtttgccgtggacattcggccaagggaccacggtggaaatcaaac

SEQ ID NO: 585 - DNA, 363 bp, Artificial Sequence
  Synthetic Polynucleotide
caggttcaattagtgcagtctggtgctgaagtgaaaaagcccggctcaagtgttaaagtaagctgtaaggcgagcggtggcccatttagctcatacgccattagctgggtgcgacaggctcctggtcagggcctcgaatggatgggcggcatcatccctatcttcggcactgcaaattatgcccagaaatttcagggtagagtcacaattaccgcagatgaaagtacgtcaaccgcctatatggaactgagtagcctgcgttccgaagatacagctgtgtattactgtgcgcgcggtacagactacagtggttaccgtggttttgacgtttggggccaggggaccttagtcactgtgtctagc

SEQ ID NO: 586 - DNA, 331 bp, Artificial Sequence
  Synthetic Polynucleotide
cagactgtggtgactcaggagccatcgttctcagtgtcccctggagggacagtcacactcacctgtgctttgagttctggctcagtctccagttttaactacgccagctggtaccagcagaccccaggccaggcgccacgcacactcatctccaacacaaacactcgctcttctggggtccctgatcgcttctctggctccatccttgggaacaaagctaccctcaccatcacgggggcccaggcagatgatgaatctcattattactgtgcactgtatgtgggtggtggcatttccgtgttcggcggagggaccaagttgaccgtcctag

SEQ ID NO: 587 - DNA, 348 bp, Artificial Sequence
  Synthetic Polynucleotide
caggttcaattagtgcagtctggtgctgaagtgaaaaagcccggctcaagtgttaaagtaagctgtaaggcgagcggtgttacttttagctcatacgccattagctgggtgcgacaggctcctggtcagggcctcgaatggatgggcggcatcaccccaatctttggcactgcaaattatgcccagaaatttcagggtagagtcacaattaccgcagatcagagtacgagcactgcatacatggaactgagtagcctgcgttccgaagatacagctgtgtattactgtgcgcgcggtggtggtgttttcgacgtttggggccaggggaccttagtcactgtgtctagc

SEQ ID NO: 588 - DNA, 331 bp, Artificial Sequence
  Synthetic Polynucleotide
tcctatgagctgactcagccaccctcggtgtctggagccccccgacagagggtcaccatctcctgttctggaagcagctccaacatcggaaataatgctgtaaactggtaccagcagctcccaggaaaggctcccaaactcctcatctattatgatgatatgctgccctcaggggtctctgaccgattctctggctccaagtctggctcctcagcctccctggccatcagtgggctccagtctgaggatgaggctgactattattgtgcagcatgggatgacagcctgagcggtccggttttcggcggagggaccaacctgaccgtcctag

SEQ ID NO: 589 - DNA, 366 bp, Artificial Sequence
  Synthetic Polynucleotide
caggttcaattagtgcagtctggtgctgaagtgaaaaagcccggctcaagtgttaaagtaagctgtaaggcgagcggaggtacttttagttcttacgccattagctgggtgcgacaggctcctggtcagggcctcgaatggatgggcggcattagccctatgttcggtactgcaaattatgcccagaaatttcagggtagagtcacaattaccgcagacaaaagtaccagcactgcctacatggaactgagtagcctgcgttccgaagatacagctgtgtattactgtgcgcgcgagggtggttacagtcctggtggtgttgacttcgactactggggccaggggaccttagtcactgtgtctagc

SEQ ID NO: 590 - DNA, 331 bp, Artificial Sequence; identical to SEQ ID NO: 414
  Synthetic Polynucleotide

SEQ ID NO: 591 - DNA, 363 bp, Artificial Sequence; identical to SEQ ID NO: 417
  Synthetic Polynucleotide

SEQ ID NO: 592 - DNA, 334 bp, Artificial Sequence; identical to SEQ ID NO: 418
  Synthetic Polynucleotide

SEQ ID NO: 593 - DNA, 375 bp, Artificial Sequence; identical to SEQ ID NO: 425
  Synthetic Polynucleotide

SEQ ID NO: 594 - DNA, 331 bp, Artificial Sequence; identical to SEQ ID NO: 426
  Synthetic Polynucleotide

SEQ ID NO: 595 - DNA, 369 bp, Artificial Sequence; identical to SEQ ID NO: 427
  Synthetic Polynucleotide

SEQ ID NO: 596 - DNA, 346 bp, Artificial Sequence; identical to SEQ ID NO: 428
  Synthetic Polynucleotide

SEQ ID NO: 597 - DNA, 375 bp, Artificial Sequence; identical to SEQ ID NO: 433
  Synthetic Polynucleotide

SEQ ID NO: 598 - DNA, 331 bp, Artificial Sequence; identical to SEQ ID NO: 434
  Synthetic Polynucleotide

SEQ ID NO: 599 - DNA, 366 bp, Artificial Sequence; identical to SEQ ID NO: 451
  Synthetic Polynucleotide

SEQ ID NO: 600 - DNA, 322 bp, Artificial Sequence; identical to SEQ ID NO: 452
  Synthetic Polynucleotide

SEQ ID NO: 601 - protein, 117 aa, Artificial Sequence
  Synthetic Polypeptide
QVQLVQSGAEVKKPGSSVKVSCKASGGTFSSYAISWVRQAPGQGLEWMGGIITIFGTANYAQKFQGRVTITADKSTSTAYMELSSLRSEDTAVYYCARGATGFYDVWGQGTLVTVSS

SEQ ID NO: 602 - protein, 110 aa, Artificial Sequence
  Synthetic Polypeptide
LPVLTQPPSASGTPGQRVTISCSGSSSNIGSNTVNWYQQLPGTAPKLLIYSNNQRPSGVPDRFSGSKSGTSASLAISGLQSEDEADYYCAAWDDSLNGPVFGGGTKLTVL

SEQ ID NO: 603 - protein, 123 aa, Artificial Sequence
  Synthetic Polypeptide
QVQLVQSGAEVKKPGSSVKVSCKASGVTFSSYAISWVRQAPGQGLEWMGGISPIFGTANYAQKFQGRVTITADESTSTAYMELSSLRSEDTAVYYCARGREYYASNGDSFDVWGQGTLVTVSS

SEQ ID NO: 604 - protein, 109 aa, Artificial Sequence
  Synthetic Polypeptide
QPVLTQPPSVSVAPGKTASISCEGNNIATKSVHWYQQKSGHAPVVVVYHDSDRPSGVPDRFSGSKSGTSASLAISGLRSEDEADYYCAAWDDSLSGPWVFGGGTKLTVL

SEQ ID NO: 605 - protein, 123 aa, Artificial Sequence
  Synthetic Polypeptide
QVQLVQSGAEVKKPGSSVKVSCKASGGTFSSYAISWVRQAPGQGLEWMGGISAIFGTANYAQKFQGRVTITADESTRTAYMELSSLRSEDTAVYYCARGSGYYVAASGAFDVWGQGTLVTVSS

SEQ ID NO: 606 - protein, 110 aa, Artificial Sequence
  Synthetic Polypeptide
QPGLTQPPSVSKGLRQTATLTCTGNINNVGDQGAGWLQQHQGRPPKLLSYRNSNRPSGVSERFSASRSGNTASLTITGLQPEDEADYYCSAWDSSLSDWVFGGGTKLTVL

SEQ ID NO: 607 - protein, 127 aa, Artificial Sequence
  Synthetic Polypeptide
QVQLVQSGAEVKKPGSSVKVSCKASGGIFSSYAISWVRQAPGQGLEWMGGITPIFGTANYAQKFQGRVTITADESTRTAYMELSSLRSEDTAVYYCARDLSRDSLNLPGSSPGYDLWGQGTLVTVSS

SEQ ID NO: 608 - protein, 107 aa, Artificial Sequence
  Synthetic Polypeptide
ETTLTQSPGTLSLSPGERATLSCRASQSVSSNLAWYQQKPGQAPRLLIYGASTRATGIPARFSGSGSGTEFTLTISSLQSEDFAVYYCQQYSSSPYTFGQGTKLEIK

SEQ ID NO: 609 - protein, 123 aa, Artificial Sequence
  Synthetic Polypeptide
QVQLVQSGAEVKKPGSSVKVSCKASGVIFSSYAISWVRQAPGQGLEWMGGISPIFGTANYAQKFQGRVTITADESTSTAYMELSSLRSEDTAVYYCARSRGYAPGTSFHYDVWGQGTLVTVSS

SEQ ID NO: 610 - protein, 108 aa, Artificial Sequence
  Synthetic Polypeptide
LPVLTQAPSMSVAPGKTASITCGGDNIGSKSVHWYQQKPGQAPVLVMYYDSDRPSGIPERFSGSNSGNTATLTISRVEAGDEADYFCQLWDHTNSHVVFGGRTKLTVL

SEQ ID NO: 611 - protein, 121 aa, Artificial Sequence
  Synthetic Polypeptide
QVQLVQSGAEVKKPGSSVKVSCKASGGTFSSYAISWVRQAPGQGLEWMGGISPIFGTANYAQKFQGRVTITSDESTSTAYMELSSLRSEDTAVYYCARDQGGTRGNYFDVWGQGTLVTVSS

SEQ ID NO: 612 - protein, 110 aa, Artificial Sequence
  Synthetic Polypeptide
QPVLTQPPSVSKGLRQTATVTCTGNSNNVGNQGAAWLQQHQGHPPKLLSYRNNNRPSGISERLSASRSGNTASLTIAGLQPEDEADYYCSAWDNTVSGWVFGGGTRVTVL

SEQ ID NO: 613 - protein, 117 aa, Artificial Sequence
  Synthetic Polypeptide
QVQLVQSGAEVKKPGSSVKVSCKASGGTFSSYAISWVRQAPGQGLEWMGGIITIFGTANYAQKFQGRVTITADESTNTAYMELSSLRSEDTAVYYCARGGGGRFDVWGQGTLVTVSS

SEQ ID NO: 614 - protein, 110 aa, Artificial Sequence
  Synthetic Polypeptide
SYELTQPPSVSGTPGQRVTISCSGSTSNIGNNALNWYQKLPGTAPKLLIYSLNQRPSGVPDRFSGSKSGTSASLAISGLQSEDEADYYCEAWDDSLSGPVFGGGTKVTVL

SEQ ID NO: 615 - protein, 117 aa, Artificial Sequence
  Synthetic Polypeptide
QVQLVQSGAEVKKPGSSVKVSCKASGGPFRSYAISWVRQAPGQGLEWMGGIIPIFGTANYAQKFQGRVTITADESTSTAYMELSSLRSEDTAVYYCARGGVYSFDVWGQGTLVTVSS

SEQ ID NO: 616 - protein, 110 aa, Artificial Sequence
  Synthetic Polypeptide
QSGLTQPPSASGTPGQRVTISCSGSGSNVGSNVVNWYQHLPGTAPKLLIYRNNQRPSGVPDRFSGSKSGTSASLAISGLQSEDEADYYCAAWDDRLNGFVFGTGTKVTVL

SEQ ID NO: 617 - protein, 125 aa, Artificial Sequence
  Synthetic Polypeptide
QVQLVQSGAEVKKPGSSVKVSCKASGVPFSSYAISWVRQAPGQGLEWMGGISPLFGTANYAQKFQGRVTITADQSTSTVYMELSSLRSEDTAVYYCARGLGTYSPSLYPRGMDVWGQGTLVTVSS

SEQ ID NO: 618 - protein, 110 aa, Artificial Sequence
  Synthetic Polypeptide
LPVLTQPPSASGTPGQSVTISCSGSSSNIGRNDVNWYQQFPGRAPKLLIYGRDERPFGVPARFSGSKSGTSASLAISGLQSEDEADYYCAAWDASLMIYVFGTGTTVTVL

SEQ ID NO: 619 - protein, 122 aa, Artificial Sequence
  Synthetic Polypeptide
QVQLVQSGAEVKKPGSSVKVSCKASGVTFSSYAISWVRQAPGQGLEWMGGISPMFGTANYAQKFQGRVTITADESTNTVYMELSSLRSEDTAVYYCARGRAYLSVRGSFDVWGQGTLVTVSS

SEQ ID NO: 620 - protein, 110 aa, Artificial Sequence
  Synthetic Polypeptide
SYELTQPPSVSGTPGQRVTISCSGSSSNIGSNTVNWYQQLPGTAPKLLIYSNNQRPSGVPDRFSGSKSGTSASLAISGLQSEDEADYYCAAWDDSLNGYVFGTGTKVTVL

SEQ ID NO: 621 - protein, 117 aa, Artificial Sequence
  Synthetic Polypeptide
QVQLVQSGAEVKKPGSSVKVSCKASGVIFSSYAISWVRQAPGQGLEWMGGIIPIFGTANYAQKFQGRVTITADKSTSTAYMELSSLRSEDTAVYYCARGGSGSFDVWGQGTLVTVSS

SEQ ID NO: 622 - protein, 110 aa, Artificial Sequence
  Synthetic Polypeptide
QPGLTQPPSASGTPGQRVTISCSGSSSNLGSNYVFWYQHLPGAAPKLLIYRNSQRPSGVPDRFSGSKSGTSASLAISGLQSEDEADYYCAAWDDSLNGVVFGGGTKLTVL

SEQ ID NO: 623 - protein, 125 aa, Artificial Sequence
  Synthetic Polypeptide
QVQLVQSGAEVKKPGSSVKVSCKASGVTFSSYAISWVRQAPGQGLEWMGGISPVFGTANYAQKFQGRVTITADDSTNTAYMELSSLRSEDTAVYYCARSRGYTVSSLAGRYFDQWGQGTLVTVSS

SEQ ID NO: 624 - protein, 108 aa, Artificial Sequence
  Synthetic Polypeptide
ETTLTQSPGTLSLSPGERASLSCKASESLCSTCLAWYQQKPGQAPRLIVYGATSRATGIPDRFSGSGSGTDFTLTISRLEPEDFAVYYCQQYGSSPQTFGQGTKVEIK

SEQ ID NO: 625 - protein, 117 aa, Artificial Sequence
  Synthetic Polypeptide
QVQLVQSGAEVKKPGSSVKVSCKASGGTFSSYAISWVRQAPGQGLEWMGGIVPLFGTANYAQKFQGRVTITADESTSTAYMELSSLRSEDTAVYYCARGLGLYFDVWGQGTLVTVSS

SEQ ID NO: 626 - protein, 109 aa, Artificial Sequence
  Synthetic Polypeptide
QTVVTQEPSLTVSPGETVTLTCASSTGAVTSGYYPNWFQQKPGQAPRALIYSTSNKHSWTPARFSGSLLGGKAALTLSGVQPEDEAEYYCLLYYGGPWVFGGGTKLTVL

SEQ ID NO: 627 - protein, 122 aa, Artificial Sequence
  Synthetic Polypeptide
QVQLVQSGAEVKKPGSSVKVSCKASGGTFSSYAISWVRQAPGQGLEWMGGIIPIFGTANYAQKFQGRVTITADESTNTAYMELSSLRSEDTAVYYCARVRGGYGPYGDFDVWGQGTLVTVSS

SEQ ID NO: 628 - protein, 110 aa, Artificial Sequence
  Synthetic Polypeptide
QPGLTQPPSASGTPGQRVTISCSGSSSNIGSHSVNWYRQLPGTAPQLLIYGNSNRPSGVPDRFSGSKSGTSASLAISGLQSEDEADYFCAAWDDGLSGWVFGGGTKLTVL

SEQ ID NO: 629 - protein, 123 aa, Artificial Sequence
  Synthetic Polypeptide
QVQLVQSGAEVKKPGSSVKVSCKASGGPFSSYAISWVRQAPGQGLEWMGGISPIFGTANYAQKFQGRVTITADKSTNTAYMELSSLRSEDTAVYYCARGRSYIVSVSPGFDVWGQGTLVTVSS

SEQ ID NO: 630 - protein, 111 aa, Artificial Sequence
  Synthetic Polypeptide
QSVLTQPPSASGSPGQSVTISCTGTSSDVGGYNYVSWYQQYPGKAPKLMIYEVSKRPSGVPDRFSGSKSGTSASLAISELQSEDEADYYCASWDDSLNAYVFGSGTKVTVL

SEQ ID NO: 631 - protein, 123 aa, Artificial Sequence
  Synthetic Polypeptide
QVQLVQSGAEVKKPGSSVKVSCKASGGIFSSYAISWVRQAPGQGLEWMGGISAIFGTANYAQKFQGRVTITADESTSTAYMELSSLRSEDTAVYYCARDSGIASGYTAYMDYWGQGTLVTVSS

SEQ ID NO: 632 - protein, 108 aa, Artificial Sequence
  Synthetic Polypeptide
SSELTQDPAVSVALGQTVRITCQGDSLRTSYASWYQQKPGQSPVLVIYQSTKRPSGIPERFSASSSGNTASLTITGAQAEDEADYYCNSRGSGGNPYVFGTGTKVTVL

SEQ ID NO: 633 - protein, 117 aa, Artificial Sequence
  Synthetic Polypeptide
QVQLVQSGAEVKKPGSSVKVSCKASGGIFRSYAISWVRQAPGQGLEWMGGIIPMFGTANYAQKFQGRVTITADESTTTVYMELSSLRSEDTAVYYCARGAGSTFDVWGQGTLVTVSS

SEQ ID NO: 634 - protein, 110 aa, Artificial Sequence
  Synthetic Polypeptide
QSVLTQPPSASGTPGQRVTISCSGSSSNIGSNTVNWYQQLPGTAPRLLIYSNNQRPSGVPDRFSGSKSGTSASLAISGLQSEDEADYYCAAWDDSLNGRVFGGGTKLTVL

SEQ ID NO: 635 - protein, 121 aa, Artificial Sequence
  Synthetic Polypeptide
QVQLVQSGAEVKKPGSSVKVSCKASGGTFSSYAISWVRQAPGQGLEWMGGINPIFGTANYAQKFQGRVTITADESTNTAYMELSSLRSEDTAVYYCARGESAYYSRNYDVWGQGTLVTVSS

SEQ ID NO: 636 - protein, 110 aa, Artificial Sequence
  Synthetic Polypeptide
SYELTQPPSVSKGLRQTATLTCTGNSSNVGNQGASWLQQHQGHPPKLLSYRNDNRPSGISERFSASRSGNTASLTITGLQPEDEADYYCSAWDNSLSAWVFGGGTKLTVL

SEQ ID NO: 637 - protein, 123 aa, Artificial Sequence
  Synthetic Polypeptide
QVQLVQSGAEVKKPGSSVKVSCKASGVTFSSYAISWVRQAPGQGLEWMGGISPMFGTANYAQKFQGRVTITADESTNTAYMELSSLRSEDTAVYYCARGGGYYPAGVGRYDVWGQGTLVTVSS

SEQ ID NO: 638 - protein, 113 aa, Artificial Sequence
  Synthetic Polypeptide
DIVMTQSPDSLAVSLGERATINCKSSQNVLYSSNNKNNLAWYQQRPGQPPKVLLYWASTRASGVPDRFSGSGSGTDFTLTINSLQAEDVALYYCQQYYGKPFTFGPGTKVEIK

SEQ ID NO: 639 - protein, 121 aa, Artificial Sequence
  Synthetic Polypeptide
QVQLVQSGAEVKKPGSSVKVSCKASGGTFSSYAISWVRQAPGQGLEWMGGITPLFGTANYAQKFQGRVTITADDSTSTAYMELSSLRSEDTAVYYCARGPTLYSPPVFDVWGQGTLVTVSS

SEQ ID NO: 640 - protein, 110 aa, Artificial Sequence
  Synthetic Polypeptide
QTVVTQEPSFSVSPGGTITLTCGLSSGSVSTTNYPSWYQQTPGRTPRTLIYNTNTRSSGVPDRFSGSILGNKAALTITGAQAGDESDYYCVLYMGRGIYVFGSGTKVSVL

SEQ ID NO: 641 - protein, 123 aa, Artificial Sequence
  Synthetic Polypeptide
QVQLVQSGAEVKKPGSSVKVSCKASGGTFRSYAISWVRQAPGQGLEWMGGIMPIFGTANYAQKFQGRVTITADESTTTVYMELSSLRSEDTAVYYCARGAGVSAGPSWPFDVWGQGTLVTVSS

SEQ ID NO: 642 - protein, 110 aa, Artificial Sequence
  Synthetic Polypeptide
QPGLTQPPSVSKDLRQTATLTCTGNSNNVGKQGATWLQQHQGHPPKLLSYRNNNRPSGISERFSASRSGDTASLTITGLQPEDEADYYCSAWDSSLSVWVFGGGTKLTVL

SEQ ID NO: 643 - protein, 123 aa, Artificial Sequence
  Synthetic Polypeptide
QVQLVQSGAEVKKPGSSVKVSCKASGGTFSSYAISWVRQAPGQGLEWMGGISPMFGTANYAQKFQGRVTITADESTSTVYMELSSLRSEDTAVYYCARSRGYNVAASFGFDVWGQGTLVTVSS

SEQ ID NO: 644 - protein, 107 aa, Artificial Sequence
  Synthetic Polypeptide
EIVLTQSPSFLSASVGDRVTITCRASQYIDRSLHWYQQKPDQSPKLLIKYASQSISGVPSRFSGSGSGTDFSLTINSLETEDAATYYCHQTSSLPWTFGQGTTVEIK

SEQ ID NO: 645 - protein, 121 aa, Artificial Sequence
  Synthetic Polypeptide
QVQLVQSGAEVKKPGSSVKVSCKASGGPFSSYAISWVRQAPGQGLEWMGGIIPIFGTANYAQKFQGRVTITADESTSTAYMELSSLRSEDTAVYYCARGTDYSGYRGFDVWGQGTLVTVSS

SEQ ID NO: 646 - protein, 110 aa, Artificial Sequence
  Synthetic Polypeptide
QTVVTQEPSFSVSPGGTVTLTCALSSGSVSSFNYASWYQQTPGQAPRTLISNTNTRSSGVPDRFSGSILGNKATLTITGAQADDESHYYCALYVGGGISVFGGGTKLTVL

SEQ ID NO: 647 - protein, 116 aa, Artificial Sequence
  Synthetic Polypeptide
QVQLVQSGAEVKKPGSSVKVSCKASGVTFSSYAISWVRQAPGQGLEWMGGITPIFGTANYAQKFQGRVTITADQSTSTAYMELSSLRSEDTAVYYCARGGGVFDVWGQGTLVTVSS

SEQ ID NO: 648 - protein, 110 aa, Artificial Sequence
  Synthetic Polypeptide
SYELTQPPSVSGAPRQRVTISCSGSSSNIGNNAVNWYQQLPGKAPKLLIYYDDMLPSGVSDRFSGSKSGSSASLAISGLQSEDEADYYCAAWDDSLSGPVFGGGTNLTVL

SEQ ID NO: 649 - protein, 122 aa, Artificial Sequence; identical to SEQ ID NO: 485
  Synthetic Polypeptide

SEQ ID NO: 650 - protein, 110 aa, Artificial Sequence; identical to SEQ ID NO: 486
  Synthetic Polypeptide

SEQ ID NO: 651 - protein, 121 aa, Artificial Sequence; identical to SEQ ID NO: 489
  Synthetic Polypeptide

SEQ ID NO: 652 - protein, 111 aa, Artificial Sequence; identical to SEQ ID NO: 490
  Synthetic Polypeptide

SEQ ID NO: 653 - protein, 125 aa, Artificial Sequence; identical to SEQ ID NO: 497
  Synthetic Polypeptide

SEQ ID NO: 654 - protein, 110 aa, Artificial Sequence; identical to SEQ ID NO: 498
  Synthetic Polypeptide

SEQ ID NO: 655 - protein, 123 aa, Artificial Sequence; identical to SEQ ID NO: 499
  Synthetic Polypeptide

SEQ ID NO: 656 - protein, 115 aa, Artificial Sequence; identical to SEQ ID NO: 500
  Synthetic Polypeptide

SEQ ID NO: 657 - protein, 125 aa, Artificial Sequence; identical to SEQ ID NO: 505
  Synthetic Polypeptide

SEQ ID NO: 658 - protein, 110 aa, Artificial Sequence; identical to SEQ ID NO: 506
  Synthetic Polypeptide

SEQ ID NO: 659 - protein, 122 aa, Artificial Sequence; identical to SEQ ID NO: 523
  Synthetic Polypeptide

SEQ ID NO: 660 - protein, 107 aa, Artificial Sequence; identical to SEQ ID NO: 524
  Synthetic Polypeptide

SEQ ID NO: 661 - protein, 9 aa, Artificial Sequence
  Synthetic Polypeptide
  misc_feature (4)..(5): Xaa can be any naturally occurring amino acid
  misc_feature (8)..(8): Xaa can be any naturally occurring amino acid
CARXXGYXP

SEQ ID NO: 662 - protein, 8 aa, Artificial Sequence
  Synthetic Polypeptide
  misc_feature (4)..(6): Xaa can be any naturally occurring amino acid
CARXXXYY

SEQ ID NO: 663 - DNA, 21 bp, Artificial Sequence
  Synthetic Oligonucleotide
tggacaagggcttgagtggat

SEQ ID NO: 664 - DNA, 22 bp, Artificial Sequence
  Synthetic Oligonucleotide
ccctggaacttctgtgcgtagt

SEQ ID NO: 665 - protein, 18 aa, Artificial Sequence
  Synthetic Oligonucleotide
CCTATCCTTGGTATAGCA

SEQ ID NO: 666 - DNA, 21 bp, Artificial Sequence
  Synthetic Oligonucleotide
tggacaagggcttgagtggat

SEQ ID NO: 667 - DNA, 22 bp, Artificial Sequence
  Synthetic Oligonucleotide
ccctggaacttctgtgcgtagt

SEQ ID NO: 668 - DNA, 18 bp, Artificial Sequence
  Synthetic Oligonucleotide
ccctatctttggtacagc

SEQ ID NO: 669 - protein, 11 aa, Artificial Sequence
  Synthetic Polypeptide
WGQGTLVTVSS

SEQ ID NO: 670 - protein, 20 aa, Artificial Sequence
  Synthetic Polypeptide
YYYYYGMDVWGQGTTVTVSS

SEQ ID NO: 671 - protein, 14 aa, Artificial Sequence
  Synthetic Polypeptide
FDVWGQGTLVTVSS

SEQ ID NO: 672 - protein, 16 aa, Artificial Sequence
  Synthetic Polypeptide
GGGSGGGSGGGSGGGS

SEQ ID NO: 673 - protein, 8 aa, Artificial Sequence
  Synthetic Polypeptide
IIPIFGTA

SEQ ID NO: 674 - protein, 8 aa, Artificial Sequence
  Synthetic Polypeptide
ISPIFGTA

SEQ ID NO: 675 - protein, 8 aa, Artificial Sequence
  Synthetic Polypeptide
IIPMFGTA

SEQ ID NO: 676 - protein, 8 aa, Artificial Sequence
  Synthetic Polypeptide
IIPIFRTA

SEQ ID NO: 677 - DNA, 354 bp, Artificial Sequence
  Synthetic polynucleotide
caggtgcagctggtgcagtctgggggaggcgtggtccaacctgggaggtccctgagactctcctgtgtagcctctgagttcaccttcaatacttatggcatgcactgggtccgccaggctccaggcaagggactggagtgggtggcagctatttcatatgatggaactaagaaattttatgcagactccctgaagggccgattcaccatctccagagacaattccaagaacacgttgtatctccaaatgaacagcctgagatctgaggacacggccgtgtattactgtgcgagaagtggtgactccgatgcttttgatatctggggccaagggacaatggtcaccgtctcctca

SEQ ID NO: 678 - protein, 118 aa, Artificial Sequence
  Synthetic polypeptide
QVQLVQSGGGVVQPGRSLRLSCVASEFTFNTYGMHWVRQAPGKGLEWVAAISYDGTKKFYADSLKGRFTISRDNSKNTLYLQMNSLRSEDTAVYYCARSGDSDAFDIWGQGTMVTVSS

SEQ ID NO: 679 - DNA, 321 bp, Artificial Sequence
  Synthetic polynucleotide
tcctatgagctgactcagccaccctcagtgtccgtgtccccaggacagacagccaccatcacctgctctggagatgaattgggggataaatttgctttctggtatcaacaaaagccaggccagtcccctgtgctggtcatctatcaagatagtaagaggccctcagggatccctgagcgattctctggctccaactctgggaacacagccactctgaccatcagcgggacccaggctctggatgaggctgactattactgtcaggcgtgggacagcaacagttatgtcttcggaactgggaccaaggtcaccgtcctaggt

SEQ ID NO: 680 - protein, 106 aa, Artificial Sequence
  Synthetic polypeptide
SYELTQPPSVSVSPGQTATITCSGDELGDKFAFWYQQKPGQSPVLVIYQDSKRPSGIPERFSGSNSGNTATLTISGTQALDEADYYCQAWDSNSYVFGTGTKVTVL

SEQ ID NO: 681 - DNA, 360 bp, Artificial Sequence
  Synthetic polynucleotide
gaggtgcagctggtgcagtctggggctgaggtgaaggagcctgggtcctcggtgaaggtctcctgcaaggcttctgggggcaccttcggcagttatgctatcaactgggtgcgacaggcccctggacaaaggcttgagtggatgggatggatcgacgctgccaatggtaacacaaaatattcacagaagttccagggcagagtcaccattaccggagacacatccgcgagcacagcctacatggaactgagcagcctgagatctgaagacacggctgtgtattactgtgcgagagataggtggatgactacgcgggcttttgatatctggggccaagggacaatggtcaccgtctcttca

SEQ ID NO: 682 - protein, 120 aa, Artificial Sequence
  Synthetic polypeptide
EVQLVQSGAEVKEPGSSVKVSCKASGGTFGSYAINWVRQAPGQRLEWMGWIDAANGNTKYSQKFQGRVTITGDTSASTAYMELSSLRSEDTAVYYCARDRWMTTRAFDIWGQGTMVTVSS

SEQ ID NO: 683 - DNA, 333 bp, Artificial Sequence
  Synthetic polynucleotide
cagcctgtgctgactcagccaccctcagcgtctgggacccccgggcagagggtcaccatctcttgttctggaagcagctccaacatcggaagtaattatgttttctggtaccagcagctcccagggatggcccccaaactcctcatctctaggaataatcagcggccctcaggggtccctgaccgattctctggctccaagtctggcacctcagcctccctggccatcagtgggccccagtctgaggatgaggctgattattactgtgcagcatgggatgacagcctgcgtggtcccgtgttcggcggagggaccagggtgaccgtcctaggt

SEQ ID NO: 684 - protein, 110 aa, Artificial Sequence
  Synthetic polypeptide
QPVLTQPPSASGTPGQRVTISCSGSSSNIGSNYVFWYQQLPGMAPKLLISRNNQRPSGVPDRFSGSKSGTSASLAISGPQSEDEADYYCAAWDDSLRGPVFGGGTRVTVL

SEQ ID NO: 685 - DNA, 369 bp, Artificial Sequence
  Artificial polynucleotide
caggtgcagctggtgcagtctggggctgaggtgaagaagcctgggtcctcggtgaaggtctcctgcaaggcgtctggaggcactttcagcagctatgcagtcagctgggtgcgacaggcccctggacaaggtcttgagtgggtgggaaggataatccctatttttggtaaggcaaactacgcacagaagttccagggcagagtcacgataaccgcggacaaatccacgagcacagcctatatggaactgagcagcctgagacctgaagacacggccgtatattactgtgcgagagatcaggggatttcggccaatttcaaagatgcttttgatatctggggccaagggaccacggtcaccgtctcctca

SEQ ID NO: 686 - protein, 123 aa, Artificial Sequence
  Synthetic polynucleotide
QVQLVQSGAEVKKPGSSVKVSCKASGGTFSSYAVSWVRQAPGQGLEWVGRIIPIFGKANYAQKFQGRVTITADKSTSTAYMELSSLRPEDTAVYYCARDQGISANFKDAFDIWGQGTTVTVSS

SEQ ID NO: 687 - DNA, 321 bp, Artificial Sequence
  Synthetic polynucleotide
gaaacgacactcacgcagtctccagccaccctgtctgtgtctccaggggaaagagccaccctctcctgcagggccagtgagagtgttggcagcaacttagcctggtaccagcagaaacctggccaggctcccagcctcctcatctatggtgcatccaccagggccactggtatcccagacagattcagtggcagtgggtctgggacagacttcactctcaccatcagcagcctgcagtctgaagattttgcagcttattattgtcagcagtataataactggccactcaccttcggccctgggaccaaagtggaaatcaaa

SEQ ID NO: 688 - protein, 107 aa, Artificial Sequence
  Synthetic polypeptide
ETTLTQSPATLSVSPGERATLSCRASESVGSNLAWYQQKPGQAPSLLIYGASTRATGIPDRFSGSGSGTDFTLTISSLQSEDFAAYYCQQYNNWPLTFGPGTKVEIK

SEQ ID NO: 689 - DNA, 375 bp, Artificial Sequence
  Synthetic polynucleotide
caggtgcagctggtgcagtctggggctgaggtgaagaagcctgggtcctcggtgaaggtctcctgcaaggcttctggaggcaccttcagcagctatgctatcagctgggtgcgacaggcccctggacaagggcttgagtggatgggagggatcatccctatctttggtacagcaaactacgcacagaagttccagggcagagtcacgattaccgcggacaaatccacgagcacagcctacatggagctgagcagcctgagatctgaggacacggccgtgtattactgtgcgagggtaggatattgtagtagtaccagctgtcacatcggcgcttttgatatctggggccaagggaccacggtcaccgtctcctca

SEQ ID NO: 690 - protein, 125 aa, Artificial Sequence
  Synthetic polypeptide
QVQLVQSGAEVKKPGSSVKVSCKASGGTFSSYAISWVRQAPGQGLEWMGGIIPIFGTANYAQKFQGRVTITADKSTSTAYMELSSLRSEDTAVYYCARVGYCSSTSCHIGAFDIWGQGTTVTVSS

SEQ ID NO: 691 - DNA, 321 bp, Artificial Sequence
  Synthetic polynucleotide
gaaacgacactcacgcagtctccaggcaccctgtctttgtctccaggggaaagagccaccctctcctgcagggccagtcagagtgttagcagcagcatagcctggtatcagcagaaacctgggcaggctcccaggctcctcatgtttgattcatccaccagggccactggtatcccagacaggttcagtggcagtgggtctgggacagacttcactctcaacatcagcagcctagagcctgaagattttgcagtgtattactgtcagcagtatagtagctcaccttacacttttggccaggggaccaaactggagatcaaa

SEQ ID NO: 692 - protein, 107 aa, Artificial Sequence
  Synthetic polypeptide
ETTLTQSPGTLSLSPGERATLSCRASQSVSSSIAWYQQKPGQAPRLLMFDSSTRATGIPDRFSGSGSGTDFTLNISSLEPEDFAVYYCQQYSSSPYTFGQGTKLEIK

SEQ ID NO: 693 - DNA, 375 bp, Artificial Sequence
  Synthetic polynucleotide
caggtgcagctggtgcagtctggggctgaggtgaagaagcctgggtcctcggtgaaggtctcctgcaaggcttctggaggcaccttcagcagctatgctatcagctgggtgcgacaggcccctggacaagggcttgagtggatgggagggatcatccctatctttggtacagcaaactacgcacagaagttccagggcagagtcacgattaccgcggacaaatccacgagcacagcctacatggagctgagcagcctgagatctgaggacacggccgtgtattactgtgcgagagcctcatattgtagtactaccagctgcgctagtggtgcttttgatatctggggccaaggcaccctggtcaccgtctcctca

SEQ ID NO: 694 - protein, 125 aa, Artificial Sequence
  Synthetic polypeptide
QVQLVQSGAEVKKPGSSVKVSCKASGGTFSSYAISWVRQAPGQGLEWMGGIIPIFGTANYAQKFQGRVTITADKSTSTAYMELSSLRSEDTAVYYCARASYCSTTSCASGAFDIWGQGTLVTVSS

SEQ ID NO: 695 - DNA, 339 bp, Artificial Sequence
  Synthetic polynucleotide
gacatccagatgacccagtctccagactccctggctgtgtctctgggcgagagggccaccatcaactgcaagtccagccagagtgttttatacagctccaacaataagaactacttagcttggtaccagcagaaaccaggacagcctcctaagctgctcatttactgggcatctgcccgggaatccggggtccctgaccgattcagtggcagcgggtctgggacagatttcactctcaccatcagcagcctgcagcctgaagatgtggcaatttattactgtcagcaatattatagtgttccattcactttcggccctgggaccaaagtggagatcaaa

SEQ ID NO: 696 - protein, 113 aa, Artificial Sequence
  Synthetic polypeptide
DIQMTQSPDSLAVSLGERATINCKSSQSVLYSSNNKNYLAWYQQKPGQPPKLLIYWASARESGVPDRFSGSGSGTDFTLTISSLQPEDVAIYYCQQYYSVPFTFGPGTKVEIK

SEQ ID NO: 697 - DNA, 363 bp, Artificial Sequence
  Synthetic polynucleotide
gaggtgcagctggtgcagtctggagctgaggtgaagaagcctggggcctcagtgaaggtttcctgcaaggcttctggatacaccttcaatgtatatgctatcaactgggtgcgacaggcccctggacaagggcttgagtggatgggaaggatcatccctatccttggtatagcaaactacgcacagaagttccagggcagagtcacgattaccgcggacaaatccacgagcacagcctacatggagctgagcagcctgagatctgaggacacggccgtgtattactgtgcgagagattactatggttcgggagctaggggctttgactactggggccagggcaccctggtcaccgtctcctca

SEQ ID NO: 698 - protein, 121 aa, Artificial Sequence
  Synthetic polypeptide
EVQLVQSGAEVKKPGASVKVSCKASGYTFNVYAINWVRQAPGQGLEWMGRIIPILGIANYAQKFQGRVTITADKSTSTAYMELSSLRSEDTAVYYCARDYYGSGARGFDYWGQGTLVTVSS

SEQ ID NO: 699 - DNA, 333 bp, Artificial Sequence
  Synthetic polynucleotide
cagcctgggctgactcagccaccctcggtgtccaagggcttgagacagaccgccacactcacctgcactgggaacagcaacaatgttggcaaccaaggagcagcttggctgcagcagcaccagggccaccctcccaaactcctatcctacacgaataacaaccggccctcagggatctcagagagattatctgcatccaggtcaggaaacacagcctccctggccattactggactccagcctgaggacgaggcagactattactgtgcatcatgggacagcagcctcagtgtttgggtgatcggcggagggaccaagttgaccgtcctaggt

SEQ ID NO: 700 - protein, 110 aa, Artificial Sequence
  Synthetic polypeptide
QPGLTQPPSVSKGLRQTATLTCTGNSNNVGNQGAAWLQQHQGHPPKLLSYTNNNRPSGISERLSASRSGNTASLAITGLQPEDEADYYCASWDSSLSVWVIGGGTKLTVL

SEQ ID NO: 701 - DNA, 378 bp, Artificial Sequence
  Synthetic polynucleotide
gaggtgcagctggtgcagtctggggctgaggtgaagaagcctgggtcctcggtgaaggtctcctgcaaggcttctggaggcaccttcagcagctatgctatcagctgggtgcgacaggcccctggacaagggcttgagtggatgggagggatcatccctatctttggtatagcaaactacgcacagaagttccagggcagagtcacgattaccgcggacaaatccacgagcacagcctacatggagctgagcagcctgagatctgaggacacggccgtgtattactgtgcgagctctaattactatggttcagggagttattatccgcgaagtgcttttgatatctggggccaagggaccacggtcaccgtctcctca

SEQ ID NO: 702 - protein, 126 aa, Artificial Sequence
  Synthetic polypeptide
EVQLVQSGAEVKKPGSSVKVSCKASGGTFSSYAISWVRQAPGQGLEWMGGIIPIFGIANYAQKFQGRVTITADKSTSTAYMELSSLRSEDTAVYYCASSNYYGSGSYYPRSAFDIWGQGTTVTVSS

SEQ ID NO: 703 - DNA, 321 bp, Artificial Sequence
  Synthetic polynucleotide
gaaacgacactcacgcagtctccagccaccctgtctgtgtctccaggggaaagggccatcctctcctgcagggccagtcagagtataagcaatgacttagcctggtaccagcagaaacctggccaggctcccaggctcctcatctatggtgcatccagcagggccactggcatcccagacaggttcagtggcagtgggtctgggacggacttcaccttcaccatcagcagactggagtctgaagattttgcagtgtattactgtcagcagtatggtgtttcacctctcactttcggcggggggaccaaggtggagatcaaa

SEQ ID NO: 704 - protein, 107 aa, Artificial Sequence
  Synthetic polypeptide
ETTLTQSPATLSVSPGERAILSCRASQSISNDLAWYQQKPGQAPRLLIYGASSRATGIPDRFSGSGSGTDFTFTISRLESEDFAVYYCQQYGVSPLTFGGGTKVEIK

SEQ ID NO: 705 - protein, 8 aa, Artificial Sequence
  Synthetic oligopeptide
EFTFNTYG

SEQ ID NO: 706 - protein, 8 aa, Artificial Sequence
  Synthetic oligopeptide
ISYDGTKK

SEQ ID NO: 707 - protein, 11 aa, Artificial Sequence
  Synthetic oligopeptide
ARSGDSDAFDI

SEQ ID NO: 708 - protein, 8 aa, Artificial Sequence
  Synthetic oligopeptide
GGTFGSYA

SEQ ID NO: 709 - protein, 8 aa, Artificial Sequence
  Synthetic oligopeptide
IDAANGNT

SEQ ID NO: 710 - protein, 13 aa, Artificial Sequence
  Synthetic oligopeptide
ARDRWMTTRAFDI

SEQ ID NO: 711 - protein, 8 aa, Artificial Sequence
  Synthetic oligopeptide
GGTFSSYA

SEQ ID NO: 712 - protein, 8 aa, Artificial Sequence
  Synthetic oligopeptide
IIPIFGKA

SEQ ID NO: 713 - protein, 16 aa, Artificial Sequence
  Synthetic oligopeptide
ARDQGISANFKDAFDI

SEQ ID NO: 714 - protein, 8 aa, Artificial Sequence
  Synthetic oligopeptide
GGTFSSYA

SEQ ID NO: 715 - protein, 18 aa, Artificial Sequence
  Synthetic oligopeptide
ARVGYCSSTSCHIGAFDI

SEQ ID NO: 716 - protein, 18 aa, Artificial Sequence
  Synthetic oligopeptide
ARASYCSTTSCASGAFDI

SEQ ID NO: 717 - protein, 8 aa, Artificial Sequence
  Synthetic oligopeptide
GYTFNVYA

SEQ ID NO: 718 - protein, 8 aa, Artificial Sequence
  Synthetic oligopeptide
IIPILGIA

SEQ ID NO: 719 - protein, 14 aa, Artificial Sequence
  Synthetic oligopeptide
ARDYYGSGARGFDY

SEQ ID NO: 720 - protein, 8 aa, Artificial Sequence
  Synthetic oligopeptide
IIPIFGIA

SEQ ID NO: 721 - protein, 19 aa, Artificial Sequence
  Synthetic oligopeptide
ASSNYYGSGSYYPRSAFDI

SEQ ID NO: 722 - protein, 6 aa, Artificial Sequence
  Synthetic oligopeptide
ELGDKF

SEQ ID NO: 723 - protein, 3 aa, Artificial Sequence
  Synthetic oligopeptide
QDS

SEQ ID NO: 724 - protein, 9 aa, Artificial Sequence
  Synthetic oligopeptide
QAWDSNSYV

SEQ ID NO: 725 - protein, 8 aa, Artificial Sequence
  Synthetic oligonucleotide
SSNIGSNY

SEQ ID NO: 726 - protein, 3 aa, Artificial Sequence
  Synthetic oligopeptide
RNN

SEQ ID NO: 727 - protein, 11 aa, Artificial Sequence
  Synthetic oligopeptide
AAWDDSLRGPV

SEQ ID NO: 728 - protein, 6 aa, Artificial Sequence
  Synthetic oligopeptide
ESVGSN

SEQ ID NO: 729 - protein, 3 aa, Artificial Sequence
  Synthetic oligopeptide
GAS

SEQ ID NO: 730 - protein, 9 aa, Artificial Sequence
  Synthetic oligopeptide
QQYNNWPLT

SEQ ID NO: 731 - protein, 6 aa, Artificial Sequence
  Synthetic oligopeptide
QSVSSS

SEQ ID NO: 732 - protein, 3 aa, Artificial Sequence
  Synthetic oligopeptide
DSS

SEQ ID NO: 733 - protein, 9 aa, Artificial Sequence
  Synthetic oligopeptide
QQYSSSPYT

SEQ ID NO: 734 - protein, 1255 aa, Middle East Respiratory Syndrome coronavirus
MFIFLLFLTLTSGSDLDRCTTFDDVQAPNYTQHTSSMRGVYYPDEIFRSDTLYLTQDLFLPFYSNVTGFHTINHTFGNPVIPFKDGIYFAATEKSNVVRGWVFGSTMNNKSQSVIIINNSTNVVIRACNFELCDNPFFAVSKPMGTQTHTMIFDNAFNCTFEYISDAFSLDVSEKSGNFKHLREFVFKNKDGFLYVYKGYQPIDVVRDLPSGFNTLKPIFKLPLGINITNFRAILTAFSPAQDIWGTSAAAYFVGYLKPTTFMLKYDENGTITDAVDCSQNPLAELKCSVKSFEIDKGIYQTSNFRVVPSGDVVRFPNITNLCPFGEVFNATKFPSVYAWERKKISNCVADYSVLYNSTFFSTFKCYGVSATKLNDLCFSNVYADSFVVKGDDVRQIAPGQTGVIADYNYKLPDDFMGCVLAWNTRNIDATSTGNYNYKYRYLRHGKLRPFERDISNVPFSPDGKPCTPPALNCYWPLNDYGFYTTTGIGYQPYRVVVLSFELLNAPATVCGPKLSTDLIKNQCVNFNFNGLTGTGVLTPSSKRFQPFQQFGRDVSDFTDSVRDPKTSEILDISPCSFGGVSVITPGTNASSEVAVLYQDVNCTDVSTAIHADQLTPAWRIYSTGNNVFQTQAGCLIGAEHVDTSYECDIPIGAGICASYHTVSLLRSTSQKSIVAYTMSLGADSSIAYSNNTIAIPTNFSISITTEVMPVSMAKTSVDCNMYICGDSTECANLLLQYGSFCTQLNRALSGIAAEQDRNTREVFAQVKQMYKTPTLKYFGGFNFSQILPDPLKPTKRSFIEDLLFNKVTLADAGFMKQYGECLGDINARDLICAQKFNGLTVLPPLLTDDMIAAYTAALVSGTATAGWTFGAGAALQIPFAMQMAYRFNGIGVTQNVLYENQKQIANQFNKAISQIQESLTTTSTALGKLQDVVNQNAQALNTLVKQLSSNFGAISSVLNDILSRLDKVEAEVQIDRLITGRLQSLQTYVTQQLIRAAEIRASANLAATKMSECVLGQSKRVDFCGKGYHLMSFPQAAPHGVVFLHVTYVPSQERNFTTAPAICHEGKAYFPREGVFVFNGTSWFITQRNFFSPQIITTDNTFVSGNCDVVIGIINNTVYDPLQPELDSFKEELDKYFKNHTSPDVDLGDISGINASVVNIQKEIDRLNEVAKNLNESLIDLQELGKYEQYIKWPWYVWLGFIAGLIAIVMVTILLCCMTSCCSCLKGACSCGSCCKFDEDDSEPVLKGVKLHYT

SEQ ID NO: 735 - protein, 8 aa, Artificial Sequence
  Synthetic oligopeptide
IIPIFGTA

SEQ ID NO: 736 - protein, 8 aa, Artificial Sequence
  Synthetic oligopeptide
SNNVGNQG

SEQ ID NO: 737 - protein, 12 aa, Artificial Sequence
  Synthetic oligopeptide
QSVLYSSNNKNY

SEQ ID NO: 738 - protein, 3 aa, Artificial Sequence
  Synthetic oligopeptide
WAS

SEQ ID NO: 739 - protein, 9 aa, Artificial Sequence
  Synthetic oligopeptide
QQYYSVPFT

SEQ ID NO: 740 - protein, 6 aa, Artificial Sequence
  Synthetic oligopeptide
QSISND

SEQ ID NO: 741 - protein, 9 aa, Artificial Sequence
  Synthetic oligopeptide
QQYGVSPLT

SEQ ID NO: 742 - protein, 3 aa, Artificial Sequence
  Synthetic oligopeptide
TNN

SEQ ID NO: 743 - protein, 11 aa, Artificial Sequence
  Synthetic oligopeptide
ASWDSSLSVWV

SEQ ID NO: 744 - protein, 96 aa, Homo sapiens
QVQLVQSGAEVKKPGSSVKVSCKASGGTFSSYAISWVRQAPGQGLEWMGGIIPIFGTANYAQKFQGRVTITADKSTSTAYMELSSLRSEDTAVYYC

SEQ ID NO: 745 - protein, 96 aa, Homo sapiens
QVQLVQSGAEVKKPGSSVKVSCKASGGTFSSYAISWVRQAPGQGLEWMGRIIPILGIANYAQKFQGRVTITADKSTSTAYMELSSLRSEDTAVYYC

SEQ ID NO: 746 - protein, 96 aa, Homo sapiens
QVQLVESGGGVVQPGRSLRLSCAASGFTFSSYGMHWVRQAPGKGLEWVAVISYDGSNKYYADSVKGRFTISRDNSKNTLYLQMNSLRAEDTAVYYC

SEQ ID NO: 747 - protein, 96 aa, Homo sapiens
QVQLVQSGAEVKKPGASVKVSCKASGYTFTSYAMHWVRQAPGQRLEWMGWINAGNGNTKYSQKFQGRVTITRDTSASTAYMELSSLRSEDTAVYYC

SEQ ID NO: 748 - protein, 87 aa, Homo sapiens
SYELTQPPSVSVSPGQTASITCSGDKLGDKYACWYQQKPGQSPVLVIYQDSKRPSGIPERFSGSNSGNTATLTISGTQAMDEADYYC

SEQ ID NO: 749 - protein, 89 aa, Homo sapiens
QSVLTQPPSASGTPGQRVTISCSGSSSNIGSNYVYWYQQLPGTAPKLLIYRNNQRPSGVPDRFSGSKSGTSASLAISGLRSEDEADYYC

SEQ ID NO: 750 - protein, 88 aa, Homo sapiens
EIVMTQSPATLSVSPGERATLSCRASQSVSSNLAWYQQKPGQAPRLLIYGASTRATGIPARFSGSGSGTEFTLTISSLQSEDFAVYYC

SEQ ID NO: 751 - protein, 94 aa, Homo sapiens
DIVMTQSPDSLAVSLGERATINCKSSQSVLYSSNNKNYLAWYQQKPGQPPKLLIYWASTRESGVPDRFSGSGSGTDFTLTISSLQAEDVAVYYC

SEQ ID NO: 752 - protein, 89 aa, Homo sapiens
EIVLTQSPGTLSLSPGERATLSCRASQSVSSSYLAWYQQKPGQAPRLLIYGASSRATGIPDRFSGSGSGTDFTLTISRLEPEDFAVYYC

SEQ ID NO: 753 - protein, 89 aa, Homo sapiens
QAGLTQPPSVSKGLRQTATLTCTGNSNNVGNQGAAWLQQHQGHPPKLLSYRNNNRPSGISERLSASRSGNTASLTITGLQPEDEADYYC

SEQ ID NO: 754 - protein, 12 aa, Middle East Respiratory Syndrome coronavirus
AAALDTVYRPNI

SEQ ID NO: 755 - protein, 12 aa, Middle East Respiratory Syndrome coronavirus
PAVLDTVYRPNI

SEQ ID NO: 756 - protein, 12 aa, Middle East Respiratory Syndrome coronavirus
ASALDTVYRPNI

SEQ ID NO: 757 - protein, 12 aa, Middle East Respiratory Syndrome coronavirus
AVALDTVYRPNI

SEQ ID NO: 758 - protein, 12 aa, Middle East Respiratory Syndrome coronavirus
AAAFDTVYRPNI

SEQ ID NO: 759 - protein, 12 aa, Middle East Respiratory Syndrome coronavirus
AAALGTVYRPNI

SEQ ID NO: 760 - protein, 12 aa, Middle East Respiratory Syndrome coronavirus
AAALDTAYRPNI

SEQ ID NO: 761 - protein, 12 aa, Middle East Respiratory Syndrome coronavirus
AAALDTVYRPII

SEQ ID NO: 762 - protein, 12 aa, Middle East Respiratory Syndrome coronavirus
AAALDTVYRSNI

SEQ ID NO: 763 - protein, 12 aa, Middle East Respiratory Syndrome coronavirus
AAALDTVYGPNI

SEQ ID NO: 764 - protein, 12 aa, Artificial Sequence
  Synthetic Oligopeptide
AAALDTVYSPNT

SEQ ID NO: 765 - protein, 12 aa, Middle East Respiratory Syndrome coronavirus
AAALDTVYTPNI

SEQ ID NO: 766 - protein, 12 aa, Middle East Respiratory Syndrome coronavirus
AAALDTVYKPNI

SEQ ID NO: 767 - protein, 12 aa, Middle East Respiratory Syndrome coronavirus
AAAFDAVYRPNI

SEQ ID NO: 768 - protein, 12 aa, Middle East Respiratory Syndrome coronavirus
AAALDTVYKPNI

SEQ ID NO: 769 - protein, 12 aa, Middle East Respiratory Syndrome coronavirus
AAAFDTVCRPNI

SEQ ID NO: 770 - protein, 12 aa, Middle East Respiratory Syndrome coronavirus
AAALDTVHRPNI

SEQ ID NO: 771 - protein, 112 aa, Homo sapiens
QVQLVQSGGGVVQPGRSLRLSCAASGFTFSSYGMHWVRQAPGKGLEWVAVISYDGSKYYADSVKGRFTISRDNSKNTLYLQMNSLRAEDTAVYYCARDGDVWGQGTTVTVSS

SEQ ID NO: 772 - protein, 121 aa, Homo sapiens
EVQLVESGGGVVQPGRSLRLSCAASGFTFSSYGMHWVRQAPGKGLEWVAVISYDGSNKYYADSVKGRFTISRDNSKNTLYLQVSSLRAEDTAVYYCVRDLVAAAGTAFDIWGQGTTVTVSS

SEQ ID NO: 773 - protein, 120 aa, Homo sapiens
QVQLQQSGPGLVKPSQTLSLTCAVSGDSVSSNFVAWNWIRQSPSRGLEWLGRTYYRSRWYNDYAVSVQSRIRVTPDTSKNQFSLHLDSVTPEDTAVYYCARGQHSGFDFWGQGTLVTVSS

SEQ ID NO: 774 - protein, 126 aa, Homo sapiens
QVQLVQSGAEVKKPGASVKVSCKASGYTFTSYGISWVRQAPGQGLEWMGWISAYNGNTNYAQKLQGRVTMTTDTSTSTAYMELRSLRSDDTAVYYCARDTPGIAARRYYYYGMDVWGQGTTVTVSS

SEQ ID NO: 775 - protein, 121 aa, Homo sapiens
QVQLVQSGGGVVQPGRSLRLSCAASGFTFSSYPMHWVRQAPGKGLEWMTVISSDGRNKYYPDSVKGRFTISRDNSKNTLYLQMNSLRPEDTAVYYCARGGYHDFWSGPDYWGQGTLVTVSS

SEQ ID NO: 776 - protein, 127 aa, Homo sapiens
EVQLVQSGGGLVQPGGSLRLSCAASGFTFSSYAMSWVRQAPGKGLEWVANIKQDGSEKYYVDSVKGRFTISRDNAKNSLYLQMNSLRAEDTAVYYCARDQVSGITIFGGKWRSPDVWGQGTTVTVSS

SEQ ID NO: 777 - protein, 126 aa, Homo sapiens
QVTLKESGGGVVQPGRSLRLSCAASGFTFTNYGLHWVRQAPGKGLEWVAVISHDGTKKYYADSVKGRFTISRDSSENTLYLQMNSLRPEDSALYYCARDGGYCSGGRCYSYGMDVWGQGTTVTVSS

SEQ ID NO: 778 - protein, 122 aa, Homo sapiens
QVQLVQSGGGVVLPGRSLRLSCVASGFTFRRYGMHWVRQAPGKGLEWVSLISYDGSKTFYGESVKGRFTISRDNSKNTLYLQMNSLRAEDTAVYYCARATVTTDGYYYMDVWGKGTTVTVSS

SEQ ID NO: 779 - protein, 89 aa, Homo sapiens
QSVLTQPPSVSPGQTVTISCGSGVSWYQQPGAPKLLIYNRPSGIPDRFSGSKSGNTASLTITGLQAEDAEEYYCSWDVFGGGTKLTVLG

SEQ ID NO: 780 - protein, 111 aa, Homo sapiens
QPVLTQPRSVSGSPGQSVTISCTGTISDVGGHNFVSWYQQNPGKAPKLIIFEVTKRPAGVPDRFSGSKSGNTASLTVSGLQAEDEGEYYCSSYGGSNDVIFGGGTKLSVLG

SEQ ID NO: 781 - protein, 111 aa, Homo sapiens
QSVLTQPPSVSKGLRQTATLTCTGNSNNVGNQGAAWLQQHQGHPPKLLSYRNNNRPSGISERFSASRSGNTASLTITGLQPEDEADYYCSAWDNRLKTYVFGTGGKVTVLG

SEQ ID NO: 782 - protein, 109 aa, Homo sapiens
SSELTQDPAVSVALGQTVRITCQGDSLRKFFASWYQQKPGQAPVLVIYGKNSRPSGIPDRFSGSNSRNTASLTITGAQAEDEGDYYCNSRDSRDNHQVFGAGTKVTVLS

SEQ ID NO: 783 - protein, 108 aa, Homo sapiens
EIVLTQSPATLSVSPGERATLSCRASQSVNTNLAWYQQKPGQAPRLLIYGASSRATGIPDRFSGSGSGTDFTLTISRLEPEDFAVYYCQHYGSSPLTFGGGTKLEIKR

SEQ ID NO: 784 - protein, 107 aa, Homo sapiens
SSELTQDPAVSVALGQTVRITCQGDSLRSYYASWYQQKPGQAPVLVIYGKNNRPSGIPDRFSGSKSHNTAYLTITGAQAEDEADYFCNSRSGSQRVFGGGTKLTVLG

SEQ ID NO: 785 - protein, 111 aa, Homo sapiens
QSVLTQPPSASGTPGQRVTISCSGSRSNIGSNTVNWYQQLPGTAPKLLIYTNNQRPSGVPDRFSGSKSGTSASLAITGLQAEDEADYYCLSFDSSLTSYVFGTGTKVTVLG

SEQ ID NO: 786 - protein, 112 aa, Homo sapiens
QSVLTQPPSASGTPGQRVTISCSGSRSNIGGNTVNWYQQLPGTAPKLLIYANNQRPSGVPDRFSGSKSGTSASLAISGLRSEDEADYYCAAWDDNLSGHVVFGGGTKLTVLR

SEQ ID NO: 787 - protein, 5 aa, Homo sapiens
SYGMH

SEQ ID NO: 788 - protein, 17 aa, Homo sapiens
VISYDGSNKYYADSVKG

SEQ ID NO: 789 - protein, 12 aa, Homo sapiens
DLVAAAGTAFDI

SEQ ID NO: 790 - protein, 14 aa, Homo sapiens
TGTISDVGGHNFVS

SEQ ID NO: 791 - protein, 7 aa, Homo sapiens
EVTKRPA

SEQ ID NO: 792 - protein, 10 aa, Homo sapiens
SSYGGSNDVI

SEQ ID NO: 793 - protein, 7 aa, Homo sapiens
SNFVAWN

SEQ ID NO: 794 - protein, 18 aa, Homo sapiens
RTYYRSRWYNDYAVSVQS

SEQ ID NO: 795 - protein, 8 aa, Homo sapiens
GQHSGFDF

SEQ ID NO: 796 - protein, 13 aa, Homo sapiens
TGNSNNVGNQGAA

SEQ ID NO: 797 - protein, 7 aa, Homo sapiens
RNNNRPS

SEQ ID NO: 798 - protein, 11 aa, Homo sapiens
SAWDNRLKTYV

SEQ ID NO: 799 - protein, 5 aa, Homo sapiens
SYGIS

SEQ ID NO: 800 - protein, 17 aa, Homo sapiens
WISAYNGNTNYAQKLQG

SEQ ID NO: 801 - protein, 17 aa, Homo sapiens
DTPGIAARRYYYYGMDV

SEQ ID NO: 802 - protein, 11 aa, Homo sapiens
QGDSLRKFFAS

SEQ ID NO: 803 - protein, 7 aa, Homo sapiens
GKNSRPS

SEQ ID NO: 804 - protein, 11 aa, Homo sapiens
NSRDSRDNHQV

SEQ ID NO: 805 - protein, 5 aa, Homo sapiens
SYPMH

SEQ ID NO: 806 - protein, 17 aa, Homo sapiens
VISSDGRNKYYPDSVKG

SEQ ID NO: 807 - protein, 12 aa, Homo sapiens
GGYHDFWSGPDY

SEQ ID NO: 808 - protein, 11 aa, Homo sapiens
RASQSVNTNLA

SEQ ID NO: 809 - protein, 7 aa, Homo sapiens
GASSRAT

SEQ ID NO: 810 - protein, 9 aa, Homo sapiens
QHYGSSPLT

SEQ ID NO: 811 - protein, 5 aa, Homo sapiens
SYAMS

SEQ ID NO: 812 - protein, 17 aa, Homo sapiens
NIKQDGSEKYYVDSVKG

SEQ ID NO: 813 - protein, 18 aa, Homo sapiens
DQVSGITIFGGKWRSPDV

SEQ ID NO: 814 - protein, 11 aa, Homo sapiens
QGDSLRSYYAS

SEQ ID NO: 815 - protein, 7 aa, Homo sapiens
GKNNRPS

SEQ ID NO: 816 - protein, 9 aa, Homo sapiens
NSRSGSQRV

SEQ ID NO: 817 - protein, 5 aa, Homo sapiens
NYGLH

SEQ ID NO: 818 - protein, 17 aa, Homo sapiens
VISHDGTKKYYADSVKG

SEQ ID NO: 819 - protein, 17 aa, Homo sapiens
DGGYCSGGRCYSYGMDV

SEQ ID NO: 820 - protein, 13 aa, Homo sapiens
SGSRSNIGSNTVN

SEQ ID NO: 821 - protein, 7 aa, Homo sapiens
TNNQRPS

SEQ ID NO: 822 - protein, 11 aa, Homo sapiens
LSFDSSLTSYV

SEQ ID NO: 823 - protein, 5 aa, Homo sapiens
RYGMH

SEQ ID NO: 824 - protein, 17 aa, Homo sapiens
LISYDGSKTFYGESVKG

SEQ ID NO: 825 - protein, 13 aa, Homo sapiens
ATVTTDGYYYMDV

SEQ ID NO: 826 - protein, 13 aa, Homo sapiens
SGSRSNIGGNTVN

SEQ ID NO: 827 - protein, 7 aa, Homo sapiens
ANNQRPS

SEQ ID NO: 828 - protein, 12 aa, Homo sapiens
AAWDDNLSGHVV

SEQ ID NO: 829 - protein, 3 aa, Homo sapiens
ELR

SEQ ID NO: 830 - protein, 38 aa, Homo sapiens
MEGISIYTSDNYTEEMGSGDYDSMKEPCFREENANFNK

SEQ ID NO: 831 - protein, 38 aa, Macaca mulatta
MEGISIYTSDNYTEEMGSGDYDSIKEPCFREENANFNR

SEQ ID NO: 832 - protein, 38 aa, Mus musculus
MEPISIYTSDNYSEEVGSGDYDSNKEPCFDEENVHFNR

SEQ ID NO: 833 - protein, 14 aa, Homo sapiens
DAVANWYFGNFLCK

SEQ ID NO: 834 - protein, 14 aa, Macaca mulatta
DAVANWYFGNFLCK

SEQ ID NO: 835 - protein, 14 aa, Mus musculus
DAMADWYFKNFLCK

SEQ ID NO: 836 - protein, 27 aa, Homo sapiens
NVSEADDRYICDRFYPNDLWVVVFQFQ

SEQ ID NO: 837 - protein, 27 aa, Macaca mulatta
SVSEADDRYICDRFYPNDLWVVVFQFQ

SEQ ID NO: 838 - protein, 30 aa, Mus musculus
DVSQGDIAQGRYICDRLYPDSLWMVVFQFQ

SEQ ID NO: 839 - protein, 21 aa, Homo sapiens
DSFILLEIIKQGCEFENTVHK

SEQ ID NO: 840 - protein, 21 aa, Macaca mulatta
DSFILLEIIKQGCEFENTVHK

SEQ ID NO: 841 - protein, 21 aa, Mus musculus
DSFILLGVIKQGCDFESIVHK

SEQ ID NO: 842 - protein, 365 aa, Homo sapiens
MEGISIYTSDNYTEEMGSGDYDSMKEPCFREENANFNKIFLPTIYSIIFLTGIVGNGLVILVMGYQKKLRSMTDKYRLHLSVADLLFVITLPFWAVDAVANWYFGNFLCKAVHVIYTVNLYSSVLILAFISLDRYLAIVHATNSQRPRKLLAEKVVYVGVWIPALLLTIPDFIFANVSEADDRYICDRFYPNDLWVVVFQFQHIMVGLILPGIVILSCYCIIISKLSHSKGHQKRKALKTTVILILAFFACWLPYYIGISIDSFILLEIIKQGCEFENTVHKWISITEALAFFHCCLNPILYAFLGAKFKTSAQHALTSVSRGSSLKILSKGKRGGHSSVSTESESSSFHSSGTETSQVAPALES

SEQ ID NO: 843 - protein, 341 aa, Homo sapiens
MEPCFREENANFNKIFLPTIYSIIFLTGIVGNGLVILVMGYQKKLRSMTDKYRLHLSVADLLFVITLPFWAVDAVANWYFGNFLCKAVHVIYTVNLYSSVLILAFISLDRYLAIVHATNSQRPRKLLAEKVVYVGVWIPALLLTIPDFIFANVSEADDRYICDRFYPNDLWVVVFQFQHIMVGLILPGIVILSCYCIIISKLSHSKGHQKRKALKTTVILILAFFACWLPYYIGISIDSFILLEIIKQGCEFENTVHKWISITEALAFFHCCLNPILYAFLGAKFKTSAQHALTSVSRGSSLKILSKGKRGGHSSVSTESESSSFHSSGTETSQVAPALES

SEQ ID NO: 844 - protein, 334 aa, Homo sapiens
ENANFNKIFLPTIYSIIFLTGIVGNGLVILVMGYQKKLRSMTDKYRLHLSVADLLFVITLPFWAVDAVANWYFGNFLCKAVHVIYTVNLYSSVLILAFISLDRYLAIVHATNSQRPRKLLAEKVVYVGVWIPALLLTIPDFIFANVSEADDRYICDRFYPNDLWVVVFQFQHIMVGLILPGIVILSCYCIIISKLSHSKGHQKRKALKTTVILILAFFACWLPYYIGISIDSFILLEIIKQGCEFENTVHKWISITEALAFFHCCLNPILYAFLGAKFKTSAQHALTSVSRGSSLKILSKGKRGGHSSVSTESESSSFHSSGTETSQVAPALES

SEQ ID NO: 845 - protein, 121 aa, Homo sapiens
QVQLVQSGGGLVQPGGSLRLSCAASGFTFSSYAMSWVRQAPGKGLEWVSAISGSGGSTYYADSVKGRFTISRDNSKNTLYLQMNSLRAEDTAVYYCARNGNYRGSLAFDIWGQGTLVTVSS

SEQ ID NO: 846 - protein, 113 aa, Homo sapiens
QSVLTQPPSVSGAPGQRVTISCTGSSSNIGAGYDVHWYQQLPGTAPKLLIYGNNNRPSGVPDRFSGSKSGTSASLAITGLQAEDEADYYCQSYDSSLSAWVVFGGGTKLTVLG

SEQ ID NO: 847 - protein, 119 aa, Homo sapiens
EVQLVQSGGGVVQPGGSLRLSCAASGFPFSSYAMSWVRQAPGKGLEWVSAISANGGTTYYADSVKGRFTISRDNSKNTLYLQMNSLRAEDTAVYYCANNGNYRGAFDIWGQGTMVTVSS

SEQ ID NO: 848 - protein, 119 aa, Homo sapiens
QVQLVQSGGGLVQPGGSLRLSCAASGFPFSSYAMSWVRQAPGKGLEWVSAISANGGTTYYADSVKGRFTISRDNSKNTLYLQMNSLRAEDTAVYYCANNGNYRGAFDIWGQGTMVTVSS

SEQ ID NO: 849 - protein, 119 aa, Homo sapiens; identical to SEQ ID NO: 848

SEQ ID NO: 850 - protein, 119 aa, Homo sapiens
QVQLVQSGGGLVQPGGSLRLSCAASEFTFGTYAMTWVRQAPGKGLEWVSAVSGSGGSTYYADSVKGRFTISRDNSRNTLYLQMNSLRADDTAVYYCARGPVLRYGFDIWGQGTMVTVSS

SEQ ID NO: 851 - protein, 119 aa, Homo sapiens
QVQLVQSGGGVVQPGGSLRLSCAASGFPFSSYAMSWVRQAPGKGLEWVSAISANGGTTYYADSVKGRFTISRDNSKNTLYLQMNSLRAEDTAVYYCANNGNYRGAFDIWGQGTMVTVSS

SEQ ID NO: 852 - protein, 118 aa, Homo sapiens
QVQLQESGGGLVQPGGSLRLSCAASGFTFSIYAMSWVRQAPGKGLEWVSAISGSGGGTYHADSVKGRFTISRDNSKNTLYLQMNSLRAEDTAVYYCAKFSAYSGYDLWGQGTLVTVSS

SEQ ID NO: 853 - protein, 119 aa, Homo sapiens
QVQLVQSGGGLVRPGGSLRLSCAASGFPFSSYAMSWVRQAPGKGLEWVSAISANGGTTYYADSVKGRFTISRDNSKNTLYLQMNSLRAEDTAVYYCANNGNYRGAFDIWGQGTTVTVSS

SEQ ID NO: 854 - protein, 119 aa, Homo sapiens; identical to SEQ ID NO: 848

SEQ ID NO: 855 - protein, 119 aa, Homo sapiens
EVQLVQSGGGLVQPGGSLRLSCAASGFTFSSYAMSWVRQAPGKGLEWVSAISANGGTTYYADSVKGRFTISRDNSKNTLYLQMNSLRAEDTAVYYCANNGNYRGAFDIWGQGTTVTVSS

SEQ ID NO: 856 - protein, 116 aa, Homo sapiens
QVQLVQSGGGLVQPGGSLRLSCAASGFTFSSYAMSWVRQAPGKGLEWVSAISGSGGSTYYADSVKGRFTISRDNSKNTLYLQMNSLRAEDTAVYYCARAAAGFDYWGQGTLVTVSS

SEQ ID NO: 857 - protein, 119 aa, Homo sapiens
QVQLQESGGGLVQPGGSLRLSCAASGFTFSSYAMSWVRQAPGKGLEWVSAISGSGGSTYYADSVKGRFTISRDNSKNTLYLQMNSLRAEDTAVYYCAKIGRYSSSLGYWGQGTLVTVSS

SEQ ID NO: 858 - protein, 122 aa, Homo sapiens
QVQLVQSGGGVVQPGRSLRLSCAASGFTFSSYGMHWVRQAPGKGLEWVAVISYDGSNKYYADSVKGRFTISRDNSKNTLYLQMNSLRAEDTAVYYCAREAPYSSSLDAFDIWGQGTMVTVSS

SEQ ID NO: 859 - protein, 118 aa, Homo sapiens
QVQLQESGGGLVQPGGSLRLSCAASGFTFSSYAMSWVRQAPGKGLEWVSAISGSGGSTYYADSVKGRFTISRDNSKNTLYLQMNSLRAEDTAVYYCARSHSSGGFDYWGQGTLVTVSS

SEQ ID NO: 860 - protein, 118 aa, Homo sapiens; identical to SEQ ID NO: 859

SEQ ID NO: 861 - protein, 116 aa, Homo sapiens
QVTLKESGGGVVQPGTSLRLSCAASGFTFSNYAMTWVRQAPGKGLEWVGLISYDGSVTHYTDSVKGRFTISRDNAKNSLYLQMNTLRADDTAVYYCARGSGYQEHWGQGTLVTVSS

SEQ ID NO: 862 - protein, 118 aa, Homo sapiens
QVQLVQSGGGLVQPGGSLRLSCAASGFTFSSYAMSWVRQAPGKGLEWVSAISGSGGSTYYADSVKGRFTISRDNSKNTLYLQMNSLRAEDTAVYYCATYGDYGSLDYWGQGTLVTVSS

SEQ ID NO: 863 - protein, 122 aa, Homo sapiens
QVQLVQSGGGLVQPGGSLRLSCAASGFTFSSYAMSWVRQAPGKGLEWVSAISGSGVSTYYADSVKGRFTISRDNSKNTLYLQMNSLRAEDTAVYYCAKYCSSTSCYRGMDVWGKGTLVTVSS

SEQ ID NO: 864 - protein, 119 aa, Homo sapiens
QVQLVQSGGGVVQPGRSLRLSCAASGFTFSSYGMHWVRQAPGKGLEWVAVISYDGSNKYYADSVKGRFTISRDNSKNTLYLQMNSLRAEDTAVYYCARGRAARPPFDYWGQGTLVTVSS

SEQ ID NO: 865 - protein, 119 aa, Homo sapiens; identical to SEQ ID NO: 851

SEQ ID NO: 866 - protein, 121 aa, Homo sapiens
QVQLVQSGGGLVQPGGSLRLSCAAPEFTFSKYAMSWVRQAPGKGLEWVSGISGSGGSTYYADSVKGRFTISRDNSKNTLYLQMNSLRAEDTAVYYCAKSSRSGYFLPLDYWGQGTLVTVSS

SEQ ID NO: 867 - protein, 118 aa, Homo sapiens
EVQLVESGGGVVQPGRSLRLSCAASGFTFSSYGMHWVRQAPGKGLEWVSAISGSGGSTYYADSVKGRFTISRDNAKNTLYLQMNSLRAEDTAVYYCARAAVTGGFDPWGQGTLVTVSS

SEQ ID NO: 868 - protein, 112 aa, Homo sapiens
QSVLTQPPSVSGAPGQRVTISCTGSSSNIGAGFDVHWYQQLPGTAPKLLIYGNTNRPSGVPDRFSGSKSGTSASLAITGLQAEDETDYYCQSYDSRLSAWVFGGGTKLTVLG

SEQ ID NO: 869 - protein, 111 aa, Homo sapiens
QSVLTQPPSVSGAPGQRVTISCTGSSSNIGAGYDVHWYQQLPGTAPKLLIYGNSNRPSGVPDRFSGSKSGSSASLAITGLQAEDEAHYYCQSYDRSLSWVFGGGTKLTVLG

SEQ ID NO: 870 - protein, 112 aa, Homo sapiens
QSVLTQPPSVSGAPGQRVTISCTGSSSNIGAGYDVHWYQQLPGTAPKLLIYGNTNRPSGVPDRFSGSKSGTSASLAIIGLQADDEADYYCQSYDSTLRVWMFGGGTKLTVLG

SEQ ID NO: 871 - protein, 112 aa, Homo sapiens
QSVLTQPPSVSGAPGQRITISCTGSRSNIGADYDVHWYQQLPGTAPKLLIYANNNRPSGVPGRFSASKSGTSASLAISGLQAEDEADYYCQSYDSSLRAWVFGGGTKLAVLG

SEQ ID NO: 872 - protein, 112 aa, Homo sapiens
QSVLTQPPSVSGAPGQRITISCTGSRSNIGADYDVHWYQQLPGTAPKLLIYANNNRPSGVPDRFSGSKSGTSASLAITGLQAEDETDYFCQSYDSSLSAWVFGGGTKVTVLG

SEQ ID NO: 873 - protein, 111 aa, Homo sapiens
QSVLTQPPSVSGAPGQRVTISCTGSSSNIGRGYNVHWYQQLPGTAPKLLIYDNTNRPSGVPARFSGSKSATSASLTITGLQADDEADYYCQSYDSGLRWVFGGGTKLTLLG

SEQ ID NO: 874 - protein, 111 aa, Homo sapiens
QSVLTQPPSVSGAPGQRITISCTGSSSNIGAGYDVHWYQQVPGKAPKVVIYGNNNRPSGVPDRFSGSKSGASASLAITGLQTEDEADYYCQSYDKSLTWVFGGGTKVTVLG

SEQ ID NO: 875 - protein, 111 aa, Homo sapiens
QSVLTQPPSVSGAPGQRITISCTGTSSNIGAGYDVHWYQQLPGAAPRVLIYGNNNRPSGVPDRFSGSKSGTSASLAITGLQSEDEADYYCQSYDKSLSWVFGGGTKLTVLR

SEQ ID NO: 876 - protein, 112 aa, Homo sapiens
QSVLTQPPSVSGAPGQRVTISCTGSSSNIGAGFDVHWYQQLPGTAPRLLIYGNNNRPSGVPDRFSGSKSGTSASLAITGLQAEDETDYFCQSYDSSLSAWVFGGGTKVTVLR

SEQ ID NO: 877 - protein, 112 aa, Homo sapiens
QSVLTQPPSVSGAPGQRVTISCTGSSSNIGRGYNVHWYQQLPGTAPKLLIYDDTNRPSGVPHRFSGSKSGTSASLAITGLQAEDEADYYCQSYDSSLRAWVFGGGTKLAVLG

SEQ ID NO: 878 - protein, 111 aa, Homo sapiens
QSVLTQPPSVSGAPGQRVTISCTGSSSNIGRGYNVHWYQQLPGTAPKLLIYDNTNRPSGVPARFSGSKSATSASLAITGLQADDEADYYCQSYDSGLRWVFGGGTKLTLLR

SEQ ID NO: 879 - protein, 111 aa, Homo sapiens
QSVLTQPPSVSGAPGQRVTISCTGSSSNIGRGYNVHWYQQLPGTAPKLLIYGNSNRPSGVPDRFSGSSSGNTASLTITGAQAEDEADYYCHSRDNNGHHIFGGGTKLTVLS

SEQ ID NO: 880 - protein, 112 aa, Homo sapiens
QSVLTQPPSVSGAPGQRVTISCTGSSSNIGRGYNVHWYQQLPGTAPKLLIYGNTNRPSGVPDRFSGSKSGTSASLAITGLQAEDEGDYYCQSYDSSLSAWVFGGGTKLTVLG

SEQ ID NO: 881 - protein, 112 aa, Homo sapiens
  misc_feature (83)..(83): Xaa can be any naturally occurring amino acid
QSVLTQPPSVSGAPGQRVTISCTGSSSNIGRGYNVHWYQQLPGTAPKLLIYGNTNRPSGVPDRFSGSKSGTSASLAITGLQAXDEGDYYCQSYDSSLSAWVFGGGTKLTVLG

SEQ ID NO: 882 - protein, 110 aa, Homo sapiens
LPVLTQPPSVSVAPGQTARITCGGNNIGSKSVHWYQQKPGQAPVLVIYYDSDRPSGIPERFSGSNSGNTATLTISRVEAGDEADYYCQVWDSSSDHHVVFGGGTKLTVLG

SEQ ID NO: 883 - protein, 112 aa, Homo sapiens
QSVLTQPPSVSGAPGQRVTISCTGSSSNIGAGYDVHWYQQLPGTAPKLLIYANNNRPSGVPDRFSGSKSGTSASLAITGLQAEDEADYYCQSYDSSLRAWVFGGGTKLAVLG

SEQ ID NO: 884 - protein, 112 aa, Homo sapiens; identical to SEQ ID NO: 883

SEQ ID NO: 885 - protein, 111 aa, Homo sapiens
QPVLTQPPSASGTPGQRVTISCSGSSSNIGSNYVYWYQQLPGTAPKLPIYRNNQRPSGVPDRFSGSKSGTSASLAISGLRSEDEADYYCAAWDDSLNGVVFGGGTKLTVLR

SEQ ID NO: 886 - protein, 112 aa, Homo sapiens
QSVLTQPPSVSGAPGQRVTISCTGSSSNIGAGYDVHWYQHLPGTAPKLLIYGNSNRPSGVPDRFSGSKSGTSASLAITGLQAEDETDYFCQSYDSSLSAWVFGGGTKVTVLG

SEQ ID NO: 887 - protein, 109 aa, Homo sapiens
SSELTQDPAVSVALGQTVRITCQGNSLRYYYPSWYQQKPGQAPVLVIYGKNNRPSGIPDRFSGSSSGNTASLTITGTQAEDEADYYCSSRDNTDNRVVFGGGTKLTVLG

SEQ ID NO: 888 - protein, 109 aa, Homo sapiens
QPGLTQPPSVSVAPGQTARITCGGDNIGRKSVHWYQQRPGQAPILVIRDDRDRPSGIPERFSGSSSVNTATLIISRVEAGDEADYYCQVWDSSSKHYVFGPGTKVTALG

SEQ ID NO: 889 - protein, 458 aa, Homo sapiens
MAPLCPSPWLPLLIPAPAPGLTVQLLLSLLLLMPVHPQRLPRMQEDSPLGGGSSGEDDPLGEEDLPSEEDSPREEDPPGEEDLPGEEDLPGEEDLPEVKPKSEEEGSLKLEDLPTVEAPGDPQEPQNNAHRDKEGDDQSHWRYGGDPPWPRVSPACAGRFQSPVDIRPQLAAFCPALRPLELLGFQLPPLPELRLRNNGHSVQLTLPPGLEMALGPGREYALQLHLHWGAAGRPGSEHTVEGHRFPAEIHVVHLSTAFARVDEALGRPGGLAVLAAFLEEGPEENSAYEQLLSRLEEIAEEGSETQVPGLDISALLPSDFSRYFQYEGSLTTPPCAQGVIWTVFNQTVMLSAKQLHTLSDTLWGPGDSRLQLNFRATQPLNGRVIEASFPAGVDSSPRAAEPVQLNSCLAAGDILALVFGLLFAVTSVAFLVQMRRQHRRGTKGGVSYRPAEVAETGA

SEQ ID NO: 890 - protein, 437 aa, Mus musculus
MASLGPSPWAPLSTPAPTAQLLLFLLLQVSAQPQGLSGMQGEPSLGDSSSGEDELGVDVLPSEEDAPEEADPPDGEDPPEVNSEDRMEESLGLEDLSTPEAPEHSQGSHGDEKGGGHSHWSYGGTLLWPQVSPACAGRFQSPVDIRLERTAFCRTLQPLELLGYELQPLPELSLSNNGHTVQLTLPPGLKMALGPGQEYRALQLHLHWGTSDHPGSEHTVNGHRFPAEIHVVHLSTAFSELHEALGRPGGLAVLAAFLQESPEENSAYEQLLSHLEEISEEGSKIEIPGLDVSALLPSDFSRYYRYEGSLTTPPCSQGVIWTVFNETVKLSAKQLHTLSVSLWGPRDSRLQLNFRATQPLNGRTIEASFPAAEDSSPEPVHVNSCFTAGDILALVFGLLFAVTSIAFLLQLRRQHRHRSGTKDRVSYSPAEMTETGA

SEQ ID NO: 891 - DNA, 38 bp, Artificial sequence
  Chemically synthesized primer
atcgacgcgtgcctgagcgaggtgcagctggtgcagtc

SEQ ID NO: 892 - DNA, 32 bp, Artificial sequence
  Chemically synthesized primer
caatggtcaccgtctcttcagctagcaccagg

SEQ ID NO: 893 - DNA, 35 bp, Artificial sequence
  Chemically synthesized primer
atcccaagcttaagccagtctgtgctgactcagcc

SEQ ID NO: 894 - DNA, 31 bp, Artificial sequence
  Chemically synthesized primer
ggagggaccaaattgaccgtcctaggtcagc

SEQ ID NO: 895 - DNA, 41 bp, Artificial sequence
  Chemically synthesized primer
tagggcacgcgtgtgctgagcgaggtgcagctggtgcagtc

SEQ ID NO: 896 - DNA, 32 bp, Artificial sequence
  Chemically synthesized primer
tctagtgctagctgaagagacggtgaccattg

SEQ ID NO: 897 - DNA, 35 bp, Artificial sequence
  Chemically synthesized primer
ctagcaagcttatcccagtctgtgctgactcagcc

SEQ ID NO: 898 - DNA, 26 bp, Artificial sequence
  Chemically synthesized primer
atagcacctaggacggtcagcttggt

SEQ ID NO: 899 - protein, 5 aa, Artificial sequence
  Portion of CDR1 heavy chain sequence
SYAMS

SEQ ID NO: 900 - protein, 5 aa, Artificial sequence
  Portion of CDR1 heavy chain sequence
  misc_feature (1)..(1): Xaa can be any naturally occurring amino acid
  misc_feature (5)..(5): Xaa can be any naturally occurring amino acid
XYAMX

SEQ ID NO: 901 - protein, 5 aa, Artificial sequence
  Portion of CDR1 heavy chain sequence
  misc_feature (3)..(3): Xaa can be any naturally occurring amino acid
  misc_feature (5)..(5): Xaa can be any naturally occurring amino acid
SYXMX

SEQ ID NO: 902 - protein, 17 aa, Artificial sequence
  Portion of CDR2 heavy chain sequence
  misc_feature (4)..(5): Xaa can be any naturally occurring amino acid
  misc_feature (8)..(8): Xaa can be any naturally occurring amino acid
  misc_feature (10)..(11): Xaa can be any naturally occurring amino acid
AISXXGGXTXXADSVKG

SEQ ID NO: 903 - protein, 17 aa, Artificial sequence
  Portion of CDR2 heavy chain sequence
AISGSGGSTTTADSVKG

SEQ ID NO: 904 - protein, 13 aa, Artificial sequence
  Portion of CDR3 heavy chain sequence
  misc_feature (9)..(9): Xaa can be any naturally occurring amino acid
NGNYRGSLXAFDI

SEQ ID NO: 905 - protein, 14 aa, Artificial sequence
  Portion of CDR1 light chain sequence
TGSSSNIGAGYDVH

SEQ ID NO: 906 - protein, 7 aa, Artificial sequence
  Portion of CDR2 light chain sequence
GNNNRPS

SEQ ID NO: 907 - protein, 12 aa, Artificial sequence
  Portion of CDR3 light chain sequence
QSYDSSLSAWVV

SEQ ID NO: 908 - protein, 6 aa, Artificial sequence
  Consensus sequence
EEDLPE

SEQ ID NO: 909 - protein, 10 aa, Artificial Sequence
  Portion of the CDR3 heavy chain sequence
NGNYRGAFDI

SEQ ID NO: 910 - protein, 5 aa, Artificial Sequence
  variable heavy chain, CDR1
TYAMT

SEQ ID NO: 911 - protein, 5 aa, Artificial Sequence
  variable heavy chain, CDR1
IYAMS

SEQ ID NO: 912 - protein, 5 aa, Artificial Sequence
  variable heavy chain, CDR1
SYGMH

SEQ ID NO: 913 - protein, 5 aa, Artificial Sequence
  variable heavy chain, CDR1
NYAMT

SEQ ID NO: 914 - protein, 5 aa, Artificial Sequence
  variable heavy chain, CDR1
KYAMS

SEQ ID NO: 915 - protein, 17 aa, Artificial Sequence
  variable heavy chain, CDR2
AISANGGTTYYADSVKG

SEQ ID NO: 916 - protein, 17 aa, Artificial Sequence
  variable heavy chain, CDR2
AVSGSGGSTYYADSVKG

SEQ ID NO: 917 - protein, 17 aa, Artificial Sequence
  variable heavy chain, CDR2
AISGSGGGTYHADSVKG

SEQ ID NO: 918 - protein, 17 aa, Artificial Sequence
  variable heavy chain, CDR2
AISGSGGSTYYADSVKG

SEQ ID NO: 919 - protein, 17 aa, Artificial Sequence
  variable heavy chain, CDR2
VISYDGSNKYYADSVKG

SEQ ID NO: 920 - protein, 17 aa, Artificial Sequence
  variable heavy chain, CDR2
LISYDGSVTHYTDSVKG

SEQ ID NO: 921 - protein, 17 aa, Artificial Sequence
  variable heavy chain, CDR2
AISGSGVSTYYADSVKG

SEQ ID NO: 922 - protein, 17 aa, Artificial Sequence
  variable heavy chain, CDR2
GISGSGGSTYYADSVKG

SEQ ID NO: 923 - protein, 10 aa, Artificial Sequence
  variable heavy chain, CDR3
GPVLRYGFDI

SEQ ID NO: 924 - protein, 9 aa, Artificial Sequence
  variable heavy chain, CDR3
FSAYSGYDL

SEQ ID NO: 925 - protein, 7 aa, Artificial Sequence
  variable heavy chain, CDR3
AAAGFDY

SEQ ID NO: 926 - protein, 10 aa, Artificial Sequence
  variable heavy chain, CDR3
IGRYSSSLGY

SEQ ID NO: 927 - protein, 13 aa, Artificial Sequence
  variable heavy chain, CDR3
EAPYSSSLDAFDI

SEQ ID NO: 928 - protein, 9 aa, Artificial Sequence
  variable heavy chain, CDR3
SHSSGGFDY

SEQ ID NO: 929 - protein, 7 aa, Artificial Sequence
  variable heavy chain, CDR3
GSGYQEH

SEQ ID NO: 930 - protein, 9 aa, Artificial Sequence
  variable heavy chain, CDR3
YGDYGSLDY

SEQ ID NO: 931 - protein, 13 aa, Artificial Sequence
  variable heavy chain, CDR3
YCSSTSCYRGMDV

SEQ ID NO: 932 - protein, 10 aa, Artificial Sequence
  variable heavy chain, CDR3
GRAARPPFDY

SEQ ID NO: 933 - protein, 12 aa, Artificial Sequence
  variable heavy chain, CDR3
SSRSGYFLPLDY

SEQ ID NO: 934 - protein, 9 aa, Artificial Sequence
  variable heavy chain, CDR3
AAVTGGFDP

SEQ ID NO: 935 - protein, 14 aa, Artificial Sequence
  variable light chain, CDR3
TGSSSNIGAGYDVH

SEQ ID NO: 936 - protein, 14 aa, Artificial Sequence
  variable light chain, CDR1
TGSRSNIGADYDVH

SEQ ID NO: 937 - protein, 14 aa, Artificial Sequence
  variable light chain, CDR1
TGSSSNIGRGYNVH

SEQ ID NO: 938 - protein, 14 aa, Artificial Sequence
  variable light chain, CDR1
TGTSSNIGAGYDVH

SEQ ID NO: 939 - protein, 11 aa, Artificial Sequence
  variable light chain, CDR1
GGNNIGSKSVH

SEQ ID NO: 940 - protein, 13 aa, Artificial Sequence
  variable light chain, CDR1
SGSSSNIGSNYVY

SEQ ID NO: 941 - protein, 11 aa, Artificial Sequence
  variable light chain, CDR1
QGNSLRYYYPS

SEQ ID NO: 942 - protein, 11 aa, Artificial Sequence
  variable light chain, CDR1
GGDNIGRKSVH

SEQ ID NO: 943 - protein, 7 aa, Artificial Sequence
  variable light chain, CDR2
GNSNRPS

SEQ ID NO: 944 - protein, 7 aa, Artificial Sequence
  variable light chain, CDR2
ANNNRPS

SEQ ID NO: 945 - protein, 7 aa, Artificial Sequence
  variable light chain, CDR2
DNTNRPS

SEQ ID NO: 946 - protein, 7 aa, Artificial Sequence
  variable light chain, CDR2
GNNNRPS

SEQ ID NO: 947 - protein, 7 aa, Artificial Sequence
  variable light chain, CDR2
DDTNRPS

SEQ ID NO: 948 - protein, 7 aa, Artificial Sequence
  variable light chain, CDR2
YDSDRPS

SEQ ID NO: 949 - protein, 7 aa, Artificial Sequence
  variable light chain, CDR2
RNNQRPS

SEQ ID NO: 950 - protein, 7 aa, Artificial Sequence
  variable light chain, CDR2
GKNNRPS

SEQ ID NO: 951 - protein, 7 aa, Artificial Sequence
  variable light chain, CDR2
DDRDRPS

SEQ ID NO: 952 - protein, 11 aa, Artificial Sequence
  variable light chain, CDR3
QSYDSRLSAWV

SEQ ID NO: 953 - protein, 10 aa, Artificial Sequence
  variable light chain, CDR3
QSYDRSLSWV

SEQ ID NO: 954 - protein, 11 aa, Artificial Sequence
  variable light chain, CDR3
QSYDSTLRVWM

SEQ ID NO: 955 - protein, 11 aa, Artificial Sequence
  variable light chain, CDR3
QSYDSSLRAWV

SEQ ID NO: 956 - protein, 11 aa, Artificial Sequence
  variable light chain, CDR3
QSYDSSLSAWV

SEQ ID NO: 957 - protein, 10 aa, Artificial Sequence
  variable light chain, CDR3
QSYDSGLRWV

SEQ ID NO: 958 - protein, 10 aa, Artificial Sequence
  variable light chain, CDR3
QSYDKSLTWV

SEQ ID NO: 959 - protein, 10 aa, Artificial Sequence
  variable light chain, CDR3
QSYDKSLSWV

SEQ ID NO: 960 - protein, 11 aa, Artificial Sequence
  variable light chain, CDR3
QSYDSSLSAWV

SEQ ID NO: 961 - protein, 10 aa, Artificial Sequence
  variable light chain, CDR3
HSRDNNGHHI

SEQ ID NO: 962 - protein, 12 aa, Artificial Sequence
  variable light chain, CDR3
QVWDSSSDHHVV

SEQ ID NO: 963 - protein, 11 aa, Artificial Sequence
  variable light chain, CDR3
AAWDDSLNGVV

SEQ ID NO: 964 - protein, 11 aa, Artificial Sequence
  variable light chain, CDR3
SSRDNTDNRVV

SEQ ID NO: 965 - protein, 11 aa, Artificial Sequence
  variable light chain, CDR3
QVWDSSSKHYV

SEQ ID NO: 966 - DNA, 354 bp, Homo sapiens
caggtgcagctggtgcagagcggagccgaggtgaagaagcctggagcttccgtcaaggtgtcctgcaaggccagcggctacaccttcgccagctactacatgcactggatgcggcaggcacctggacagggcctcgaatggatcggctggatcaaccccggcaacgtgaacaccaagtacaacgagaagttcaagggcagggccaccctgaccgtggacaccagcaccaacaccgcctacatggaactgagcagcctgcggagcgaggacaccgccgtgtactactgcgccagaagcacctactaccggcccctggactactggggccagggcaccctggtgaccgtgagcagc

SEQ ID NO: 967 - protein, 118 aa, Homo sapiens
QVQLVQSGAEVKKPGASVKVSCKASGYTFASYYMHWMRQAPGQGLEWIGWINPGNVNTKYNEKFKGRATLTVDTSTNTAYMELSSLRSEDTAVYYCARSTYYRPLDYWGQGTLVTVSS

SEQ ID NO: 968 - DNA, 336 bp, Homo sapiens
gacatcgtgatgacccagagccccgacagcctggccgtgagcctgggcgagcgggccaccatcaactgcaagagcagccagagcatcctgtacagcagcaaccagaagaactacctggcctggtatcagcagaagcccggccagagccccaagctgctgatctactgggccagcacccgggagagcggcgtgcccgaccggtttagcggcagcggctccggcaccgacttcaccctgaccatcagcagcctgcaggccgaggacgtggccgtgtactactgccaccagtacctgagcagctacaccttcggccagggcacaaagctggaaatcaag

SEQ ID NO: 969 - protein, 112 aa, Homo sapiens
DIVMTQSPDSLAVSLGERATINCKSSQSILYSSNQKNYLAWYQQKPGQSPKLLIYWASTRESGVPDRFSGSGSGTDFTLTISSLQAEDVAVYYCHQYLSSYTFGQGTKLEIK

SEQ ID NO: 970 - protein, 8 aa, Homo sapiens
GYTFASYY

SEQ ID NO: 971 - protein, 17 aa, Homo sapiens
WINPGNVNTKYNEKFKG

SEQ ID NO: 972 - protein, 9 aa, Homo sapiens
STYYRPLDY

SEQ ID NO: 973 - protein, 17 aa, Homo sapiens
KSSQSILYSSNQKNYLA

SEQ ID NO: 974 - protein, 7 aa, Homo sapiens
WASTRES

SEQ ID NO: 975 - protein, 8 aa, Homo sapiens
HQYLSSYT

SEQ ID NO: 976 - protein, 17 aa, Homo sapiens
  misc_feature (4)..(5): Xaa can be any naturally occurring amino acid
  misc_feature (7)..(7): Xaa can be any naturally occurring amino acid
  misc_feature (9)..(9): Xaa can be any naturally occurring amino acid
WINXXNXNXKYNEKFKG

SEQ ID NO: 977 - protein, 9 aa, Homo sapiens
  misc_feature (2)..(2): Xaa can be any naturally occurring amino acid
  misc_feature (4)..(5): Xaa can be any naturally occurring amino acid
  misc_feature (9)..(9): Xaa can be any naturally occurring amino acid
SXYXXPLDX

SEQ ID NO: 978 - protein, 17 aa, Homo sapiens
  misc_feature (6)..(6): Xaa can be any naturally occurring amino acid
  misc_feature (10)..(13): Xaa can be any naturally occurring amino acid
KSSQSXLYSXXXXNYLA

SEQ ID NO: 979 - protein, 7 aa, Homo sapiens
  misc_feature (4)..(5): Xaa can be any naturally occurring amino acid
WASXXES

SEQ ID NO: 980 - protein, 8 aa, Homo sapiens
  misc_feature (5)..(6): Xaa can be any naturally occurring amino acid
HQYLXXYT

SEQ ID NO: 981 - DNA, 369 bp, Homo sapiens
caggtgcagctggtgcagtctggggctgaggtgaagaagcctgggtcctcggtgaaggtctcctgcaaggcttctggaggcaccttcagtgacaatgctatcagctgggtgcgacaggccccaggacaagggcttgagtggatggggggcatcattcctatctttggaaaaccaaactacgcacagaagttccagggcagagtcacgattactgcggacgaatccacgagcacagcctacatggacctgaggagcctgagatctgaggacacggccgtttattactgtgcgagagattcagacgcgtattactatggttcggggggtatggacgtctggggccaaggcaccctggtcaccgtctcctca

SEQ ID NO: 982 - protein, 123 aa, Homo sapiens
QVQLVQSGAEVKKPGSSVKVSCKASGGTFSDNAISWVRQAPGQGLEWMGGIIPIFGKPNYAQKFQGRVTITADESTSTAYMDLRSLRSEDTAVYYCARDSDAYYYGSGGMDVWGQGTLVTVSS

SEQ ID NO: 983 - DNA, 335 bp, Homo sapiens
ctgcctgtgctgactcaatcatcctctgcctctgcttccctgggatcctcggtcaagctcacctgcactctgagcagtgggcatagtaactacatcatcgcatggcatcaacagcagccagggaaggcccctcggtacttgatgaaggttaatagtgatggcagccacaccaagggggacgggatccctgatcgcttctcaggctccagctctggggctgaccgctacctcaccatctccaacctccagtctgaggatgaggctagttatttctgtgagacctgggacactaagattcatgtcttcggaactgggaccaaggtctccgtcctcag

SEQ ID NO: 984 - protein, 111 aa, Homo sapiens
LPVLTQSSSASASLGSSVKLTCTLSSGHSNYIIAWHQQQPGKAPRYLMKVNSDGSHTKGDGIPDRFSGSSSGADRYLTISNLQSEDEASYFCETWDTKIHVFGTGTKVSVL

SEQ ID NO: 985 - DNA, 363 bp, Homo sapiens
caggtgcagctggtgcagtctggggctgaggtgaagaagcctgggtcctcggtgaaggtctcctgcaaggctcctggaggtatcttcaacaccaatgctttcagctgggtccgacaggcccctggacaaggtcttgagtgggtgggaggggtcatccctttgtttcgaacagcaagctacgcacagaacgtccagggcagagtcaccattaccgcggacgaatccacgaacacagcctacatggagcttaccagcctgagatctgcggacacggccgtgtattactgtgcgagaagtagtggttaccattttaggagtcactttgactcctggggcctgggaaccctggtcaccgtctcctca

SEQ ID NO: 986 - protein, 121 aa, Homo sapiens
QVQLVQSGAEVKKPGSSVKVSCKAPGGIFNTNAFSWVRQAPGQGLEWVGGVIPLFRTASYAQNVQGRVTITADESTNTAYMELTSLRSADTAVYYCARSSGYHFRSHFDSWGLGTLVTVSS

SEQ ID NO: 987 - DNA, 363 bp, Homo sapiens
caggtgcagctggtgcaatctggggctgaggtgaagaagcctgggtcctcggtgaaggtctcctgcaaggctcctggaggtatcttcaacaccaatgctttcagctgggtccgacaggcccctggacaaggtcttgagtgggtgggaggggtcatccctttgtttcgaacagcaagctacgcacagaacgtccagggcagagtcaccattaccgcggacgaatccacgaacacagcctacatggagcttaccagcctgagatctgcggacacggccgtgtattactgtgcgagaagtagtggttaccattttaggagtcactttgactcctggggcctgggaaccctggtcaccgtctcctca

SEQ ID NO: 988 - protein, 111 aa, Homo sapiens
NFMLTQPHSVSASPGKTVTISCTGSSGNIAANYVQWYQQRPGSAPTTVIYEDDRRPSGVPDRFSGSIDRSSNSASLTISGLKTEDEADYYCQTYDTNNHAVFGGGTHLTVL

SEQ ID NO: 989 - DNA, 333 bp, Homo sapiens
aattttatgctgactcagccccactctgtgtcggcgtctccggggaagacggtgaccatctcctgcaccggcagcagtggcaacattgccgccaactatgtgcagtggtaccaacaacgtccgggcagtgcccccactactgtgatctatgaggatgaccgaagaccctctggggtccctgatcggttctctggctccatcgacaggtcctccaactctgcctccctcaccatctcaggactgaagactgaggacgaggctgactactactgtcagacttatgataccaacaatcatgctgtgttcggaggaggcacccacctgaccgtcctc

SEQ ID NO: 990 - protein, 110 aa, Homo sapiens
SYELTQPPSASGKHGQRVTISCSGGTSNIGRNHVNWYQQLPGTAPKLLIYSNEQRPSGVPDRFSGSKSGTSASLAVSGLQSEDEADYYCASWDDNLSGWVFGGGTKLTVL

SEQ ID NO: 991 - DNA, 330 bp, Homo sapiens
tcctatgagctgactcagccaccctcagcgtctgggaaacacgggcagagggtcaccatctcttgttctggaggcacctccaacatcggacgtaatcatgttaactggtaccagcaactcccaggaacggcccccaaactcctcatctatagtaatgaacagcggccctcaggggtccctgaccgattctctggctccaaatctggcacctccgcctccctggccgtgagtgggctccagtctgaggatgaggctgattattactgtgcatcatgggatgacaacttgagtggttgggtgttcggcggagggaccaagctgaccgtccta

SEQ ID NO: 992 - protein, 120 aa, Homo sapiens
QVQLVQSGAEVKKPGSSVKVSCKASGGTFSAYAFTWVRQAPGQGLEWMGGITGMFGTANYAQKFQGRVTITADELTSTAYMELSSLTSEDTALYYCARGLYYYESSLDYWGQGTLVTVSS

SEQ ID NO: 993 - DNA, 361 bp, Homo sapiens
caggtgcagctggtgcagtctggggctgaggtgaagaagcctgggtcctcggtgaaggtctcctgcaaggcttctggaggcaccttcagcgcttatgctttcacctgggtgcggcaggcccctggacaagggcttgagtggatgggaggcatcaccggaatgtttggcacagcaaactacgcacagaagttccagggcagagtcacgattaccgcggacgaactcacgagcacagcctacatggagttgagctccctgacatctgaagacacggccctttattattgtgcgagaggattgtattactatgagagtagtcttgactattggggccagggaaccctggtcaccgtctcctcag

SEQ ID NO: 994 - protein, 110 aa, Homo sapiens
QSVLTQPPSASGSPGQSVTISCTGTSSDVGGYNSVSWYQQHPGKAPKLMIYEVTKRPSGVPDRFSASKSGNTASLTVSGLQAEDEADYFCCSYAGHSAYVFGTGTKVTVL

SEQ ID NO: 995 - DNA, 361 bp, Homo sapiens
caggtgcagctggtgcagtctggggctgaggtgaagaagcctgggtcctcggtgaaggtctcctgcagggcttctggaggcaccttcagcgcttatgctttcacctgggtgcggcaggcccctggacaagggcttgagtggatgggaggcatcaccggaatgtttggcacagcaaactacgcacagaagttccagggcagagtcacgattaccgcggacgaactcacgagcacagcctacatggagttgagctccctgacatctgaagacacggccctttattattgtgcgagaggattgtattactatgagagtagtcttgactattggggccagggaaccctggtcaccgtctcctcag

SEQ ID NO: 996 - protein, 108 aa, Homo sapiens
EIVLTQSPGTLSLSPGERATLSCRASQSLSSKYLAWYQQKPGQAPRLLIYGASSRATGIPDRFSGSGSGTDFTLTISRLEPEDFAVYSCQQYDGVPRTFGQGTTVEIK

SEQ ID NO: 997 - DNA, 330 bp, Homo sapiens
cagtctgtgctgactcagccaccctccgcgtccgggtctcctggacagtcagtcaccatctcctgcactggaaccagcagtgacgttggtggttataactctgtctcctggtaccaacagcacccaggcaaagcccccaaactcatgatttatgaggtcactaagcggccctcaggggtccctgatcgcttctctgcctccaagtctggcaacacggcctccctgaccgtctctgggctccaggctgaggatgaggctgattatttctgctgctcatatgcaggccacagtgcttatgtcttcggaactgggaccaaggtcaccgtcctg

SEQ ID NO: 998 - protein, 124 aa, Homo sapiens
QVQLVQSGAEVKKPGSSVKVSCTSSEVTFSSFAISWVRQAPGQGLEWLGGISPMFGTPNYAQKFQGRVTITADQSTRTAYMDLRSLRSEDTAVYYCARSPSYICSGGTCVFDHWGQGTLVTVSS

SEQ ID NO: 999 - DNA, 324 bp, Homo sapiens
gaaattgtgctgactcagtctccaggcaccctgtctttgtctccaggggaaagagccaccctctcctgcagggccagtcagagtcttagcagcaagtacttagcctggtatcagcagaaacctggccaggctcccaggctcctcatctatggtgcatccagcagggccactggcatcccagacaggttcagtggcagtgggtctgggacagacttcaccctcaccatcagtagactggagcctgaagattttgcagtgtattcctgtcagcagtatgatggcgtacctcggacgttcggccaagggaccacggtggaaatcaaa

SEQ ID NO: 1000 - protein, 110 aa, Homo sapiens
QPGLTQPPSVSKGLRQTATLTCTGNSNNVGNQGAAWLQQHQGHPPKLLSYRNNDRPSGISERFSASRSGNTASLTITGLQPEDEADYYCSTWDSSLSAVVFGGGTKLTVL

SEQ ID NO: 1001 - DNA, 372 bp, Homo sapiens
caggtgcagctggtgcagtcaggggctgaggtgaagaagcctgggtcctcggtgaaggtctcctgcacgtcctctgaagtcaccttcagtagttttgctatcagctgggtgcgacaggcccctggacaagggcttgagtggctgggagggatcagccctatgtttggaacacctaattacgcgcagaagttccaaggcagagtcaccattaccgcggaccagtccacgaggacagcctacatggacctgaggagcctgagatctgaggacacggccgtgtattattgtgcgagatctccttcttacatttgttctggtggaacctgcgtctttgaccattggggccagggaaccctggtcaccgtctcctca

SEQ ID NO: 1002 - protein, 107 aa, Homo sapiens
DIQMTQSPSSLSASVGDRVTITCRASQSISSYLNWYQQKPGKAPKLLIYAASSLQRGVPSRFSGSGSGTDFTLTISSLQPEDFAVYYCQQYDSSPYTFGQGTKVEIK

SEQ ID NO: 1003 - DNA, 372 bp, Homo sapiens
caggtacagctgcagcagtcaggggctgaggtgaagaagcctgggtcctcggtgaaggtctcctgcacgtcctctgaagtcaccttcagtagttttgctatcagctgggtgcgacaggcccctggacaagggcttgagtggctgggagggatcagccctatgtttggaacacctaattacgcgcagaagttccaaggcagagtcaccattaccgcggaccagtccacgaggacagcctacatggacctgaggagcctgagatctgaggacacggccgtgtattattgtgcgagatctccttcttacatttgttctggtggaacctgcgtctttgaccattggggccagggaaccctggtcaccgtctcctca

SEQ ID NO: 1004 - protein, 122 aa, Homo sapiens
QVQLVQSGAEVKKPGASVKVSCKTSGVTFSSYAISWVRQAPGQGLEWMGGIIGVFGVPKYAQNFQGRVTITADKPTSTVYMELNSLRAEDTAVYYCAREPGYYVGKNGFDVWGQGTMVTVSS

SEQ ID NO: 1005 - DNA, 330 bp, Homo sapiens
cagcctgggctgactcagccaccctcggtgtccaagggcttgagacagaccgccacactcacctgcactgggaacagcaacaatgttggcaaccaaggagcagcttggctgcagcagcaccagggccaccctcccaaactcctatcctacaggaataatgaccggccctcagggatctcagagagattctctgcatccaggtcaggaaacacagcctccctgaccattactggactccagcctgaggacgaggctgactattactgctcaacatgggacagcagcctcagtgctgtggtattcggcggagggaccaagctgaccgtccta

SEQ ID NO: 1006 - protein, 110 aa, Homo sapiens
SYELTQPPSVSKGLRQTAILTCTGDSNNVGHQGTAWLQQHQGHPPKLLSYRNGNRPSGISERFSASRSGNTASLTIIGLQPEDEADYYCSVWDSSLSAWVFGGGTKLTVL

SEQ ID NO: 1007 - DNA, 321 bp, Homo sapiens
gacatccagatgacccagtctccatcctccctgtctgcatctgtaggagacagagtcaccatcacttgccgggcaagtcagagcattagcagctatttaaattggtatcagcagaaaccagggaaagcccctaagctcctgatctatgctgcatccagtttgcaaagaggggtcccatcaaggttcagtggcagtggatctgggacagacttcactctcaccattagcagcctgcagcctgaagattttgcagtgtattactgtcagcagtatgatagttcaccgtacacttttggccaggggaccaaggtagagatcaaa

SEQ ID NO: 1008 - protein, 126 aa, Homo sapiens
QVQLVQSGAEVRKPGASVKVSCKASGYTFTGYYIHWVRQAPGQGLEWMGWINPMTGGTNYAQKFQVWVTMTRDTSINTAYMEVSRLTSDDTAVYYCARGASVLRYFDWQPEALDIWGLGTTVTVSS

SEQ ID NO: 1009 - DNA, 366 bp, Homo sapiens
caggtgcagctggtgcaatctggggctgaagtgaagaagcctggggcctcagtgaaggtctcctgcaagacttctggagtcaccttcagcagctatgctatcagttgggtgcgacaggcccctggacaagggcttgagtggatgggagggatcatcggtgtctttggtgtaccaaagtacgcgcagaacttccagggcagagtcacaattaccgcggacaaaccgacgagtacagtctacatggagctgaacagcctgagagctgaggacacggccgtgtattactgtgcgagagagcccgggtactacgtaggaaagaatggttttgatgtctggggccaagggacaatggtcaccgtctcttca

SEQ ID NO: 1010 - protein, 108 aa, Homo sapiens
QPVLTQPPSVSVAPGQTASIPCGGNNIGGYSVHWYQQKPGQAPLLVIYDDKDRPSGIPERFSGANSGSTATLTISRVEAGDEGDYYCQVWDSGNDRPLFGGGTKLTVL

SEQ ID NO: 1011 - DNA, 330 bp, Homo sapiens
tcctatgagctgactcagccaccctcggtgtccaagggcttgagacagaccgccatactcacctgcactggagacagcaacaatgttggccaccaaggtacagcttggctgcaacaacaccagggccaccctcccaaactcctatcctacaggaatggcaaccggccctcagggatctcagagagattctctgcatccaggtcaggaaatacagcctccctgaccattattggactccagcctgaggacgaggctgactactactgctcagtatgggacagcagcctcagtgcctgggtgttcggcggagggaccaagctgaccgtccta

SEQ ID NO: 1012 - protein, 123 aa, Homo sapiens
QVQLVQSGAEVKKPGSSVKVSCKASGGPFSMTAFTWLRQAPGQGLEWMGGISPIFRTPKYAQKFQGRVTITADESTNTANMELTSLKSEDTAVYYCARTLSSYQPNNDAFAIWGQGTMVTVSS

SEQ ID NO: 1013 - DNA, 378 bp, Homo sapiens
caggtgcagctggtgcagtctggggctgaggtgaggaagcctggggcctcagtgaaggtctcatgtaaggcttctggatacaccttcaccggttattatattcactgggtgcgacaggcccctggacaaggacttgagtggatgggttggatcaaccctatgactggtggcacaaactatgcacagaagtttcaggtctgggtcaccatgacccgggacacgtccatcaacacagcctacatggaggtgagcaggctgacatctgacgacacggccgtgtattactgtgcgaggggggcttccgtattacgatattttgactggcagcccgaggctcttgatatctggggcctcgggaccacggtcaccgtctcctca

SEQ ID NO: 1014 - protein, 106 aa, Homo sapiens
EIVLTQSPATLSLSPGERATLSCRASQSVSSYLAWYQQKPGQAPRLLIYDASNRATGIPARFSGSGSGTDFTLTISRLEPEDFAVYFCQQYGSSPQFGQGTRLEIK

SEQ ID NO: 1015 - DNA, 324 bp, Homo sapiens
cagcctgtgctgactcagccaccctcggtgtcagtggccccaggacagacggccagcattccctgtggggggaacaacattggaggctacagtgtacactggtaccaacaaaagccgggccaggcccccctcttggtcatttatgacgataaagaccggccctcagggatccctgagcgattctctggcgccaactctgggagcacggccaccctgacaatcagcagggtcgaagccggggatgagggcgactactactgtcaggtgtgggatagtggtaatgatcgtccgctgttcggcggagggaccaagctgaccgtccta

SEQ ID NO: 1016 - protein, 123 aa, Homo sapiens; identical to SEQ ID NO: 1012

SEQ ID NO: 1017 - DNA, 369 bp, Homo sapiens
caggtgcagctggtgcagtctggggctgaagtgaagaagcctggctcctcggtgaaggtttcctgcaaggcttctggaggccccttcagcatgactgctttcacctggctgcgacaggcccctggacaagggcttgagtggatgggtgggatcagccctatctttcgtacaccgaagtacgcacagaagttccagggcagagtcacgattaccgcggacgaatccacgaacacagccaacatggagctgaccagcctgaaatctgaggacacggccgtgtattactgtgcgagaaccctttcctcctaccaaccgaataatgatgcttttgctatctggggccaagggacaatggtcaccgtctcttca

SEQ ID NO: 1018 - protein, 110 aa, Homo sapiens
LPVLTQPPSASGTPGQRVTISCSGSSSNIGSNTVNWYQQLPGTAPKLLIYSNNQRPSGVPDRFSGSRSGTSASLAIIGLRPEDEADYYCQSYDSRLSASLFGTGTTVTVL

SEQ ID NO: 1019 - DNA, 318 bp, Homo sapiens
gaaattgtgttgacgcagtctccagccaccctgtctttgtctccaggggaaagagccaccctctcctgcagggccagtcagagtgttagcagctacttagcctggtaccaacagaaacctggccaggctcccaggctcctcatctatgatgcatccaacagggccactggcatcccagccaggttcagtggcagtgggtctgggacagacttcactctcaccatcagcagactggagcctgaagattttgcagtctatttctgtcagcagtatggtagctcacctcaattcggccaagggacacgactggagattaaa

SEQ ID NO: 1020 - DNA, 369 bp, Homo sapiens; identical to SEQ ID NO: 1017

SEQ ID NO: 1021 - skipped

SEQ ID NO: 1022 - DNA, 330 bp, Homo sapiens
ctgcctgtgctgactcagccaccctcagcgtctgggacccccgggcagagggtcaccatctcttgttctggaagcagctccaacatcggaagtaatactgtaaactggtaccagcagctcccaggaacggcccccaaactcctcatctatagtaataatcagcggccctcaggggtccctgaccgattctctggctccaggtcaggcacctcagcctccctggccatcattggactccggcctgaggatgaagctgattattactgtcagtcgtatgacagcaggctcagtgcttctctcttcggaactgggaccacggtcaccgtcctc

SEQ ID NO: 1023 - protein, 5 aa, Artificial Sequence
  Consensus Sequence
SYAFS

SEQ ID NO: 1024 - protein, 5 aa, Homo sapiens
TNAFS

SEQ ID NO: 1025 - protein, 5 aa, Homo sapiens
AYAFT

SEQ ID NO: 1026 - protein, 5 aa, Homo sapiens
SFAIS

SEQ ID NO: 1027 - protein, 5 aa, Homo sapiens
SYAIS

SEQ ID NO: 1028 - protein, 5 aa, Homo sapiens
GYYIH

SEQ ID NO: 1029 - protein, 5 aa, Homo sapiens
MTAFT

SEQ ID NO: 1030 - protein, 5 aa, Homo sapiens
DNAIS

SEQ ID NO: 1031 - protein, 17 aa, Artificial Sequence
  Consensus Sequence
GIIPMFGTPNYAQKFQG

SEQ ID NO: 1032 - protein, 17 aa, Homo sapiens
GVIPLFRTASYAQNVQG

SEQ ID NO: 1033 - protein, 17 aa, Homo sapiens
GIIGMFGTANYAQKFQG

SEQ ID NO: 1034 - protein, 17 aa, Homo sapiens
GISPMFGTPNYAQKFQG

SEQ ID NO: 1035 - protein, 17 aa, Homo sapiens
GIIGVFGVPKYAQKFQG

SEQ ID NO: 1036 - protein, 17 aa, Homo sapiens
WINPMTGGTNYAQKFQV

SEQ ID NO: 1037 - protein, 17 aa, Homo sapiens
GISPIFRTPKYAQKFQG

SEQ ID NO: 1038 - protein, 17 aa, Homo sapiens
GIIPIFGKPNYAQKFQG

SEQ ID NO: 1039 - protein, 12 aa, Artificial Sequence
  Consensus Sequence
SSGYYYGGGFDV

SEQ ID NO: 1040 - protein, 13 aa, Homo sapiens
SSGYHFGRSHFDS

SEQ ID NO: 1041 - protein, 11 aa, Homo sapiens
GLYYYESSLDY

SEQ ID NO: 1042 - protein, 15 aa, Homo sapiens
SPSYICSGGTCVFDH

SEQ ID NO: 1043 - protein, 13 aa, Homo sapiens
EPGYYVGKNGFDV

SEQ ID NO: 1044 - protein, 17 aa, Homo sapiens
GASVLRYFDWQPEALDI

SEQ ID NO: 1045 - protein, 14 aa, Homo sapiens
TLSSYQPNNDAFAI

SEQ ID NO: 1046 - protein, 14 aa, Homo sapiens
DSDAYYYGSGGMDV

SEQ ID NO: 1047 - protein, 12 aa, Homo sapiens
TGSSSNIGNYVA

SEQ ID NO: 1048 - protein, 13 aa, Homo sapiens
TGSSSNIAANYVQ

SEQ ID NO: 1049 - protein, 14 aa, Artificial Sequence
  Consensus Sequence
TGTSSDVGGYNSVS

SEQ ID NO: 1050 - protein, 13 aa, Homo sapiens
TGNSNNVGNQGAA

SEQ ID NO: 1051 - protein, 13 aa, Homo sapiens
TGDSNNVGHQGTA

SEQ ID NO: 1052 - protein, 11 aa, Homo sapiens
GGNNIGGYSVH

SEQ ID NO: 1053 - protein, 11 aa, Homo sapiens
RASQSVSSYLA

SEQ ID NO: 1054 - protein, 12 aa, Homo sapiens
RASQSLSSKYLA

SEQ ID NO: 1055 - protein, 12 aa, Homo sapiens
TGSSSNIGNYVA

SEQ ID NO: 1056 - protein, 13 aa, Homo sapiens
SGSSSNIGSNTVN

SEQ ID NO: 1057 - protein, 11 aa, Homo sapiens
RASQSISSYLN

SEQ ID NO: 1058 - protein, 12 aa, Homo sapiens
TLSSGHSNYIIA

SEQ ID NO: 1059 - protein, 7 aa, Artificial Sequence
  Consensus Sequence
SNSDRPS

SEQ ID NO: 1060 - protein, 7 aa, Homo sapiens
EDDRRPS

SEQ ID NO: 1061 - protein, 7 aa, Homo sapiens
EVTKRPS

SEQ ID NO: 1062 - protein, 7 aa, Homo sapiens
RNNDRPS

SEQ ID NO: 1063 - protein, 7 aa, Homo sapiens
RNGNRPS

SEQ ID NO: 1064 - protein, 7 aa, Homo sapiens
DDKDRPS

SEQ ID NO: 1065 - protein, 7 aa, Homo sapiens
DASNRAT

SEQ ID NO: 1066 - protein, 7 aa, Homo sapiens
GASSRAT

SEQ ID NO: 1067 - protein, 7 aa, Homo sapiens
SNNQRPS

SEQ ID NO: 1068 - protein, 7 aa, Homo sapiens
AASSLQR

SEQ ID NO: 1069 - protein, 7 aa, Homo sapiens
SNEQRPS

SEQ ID NO: 1070 - protein, 11 aa, Homo sapiens
VNSDGSHTKGD

SEQ ID NO: 1071 - protein, 10 aa, Artificial Sequence
  Consensus Sequence
QSYDSLSAYV

SEQ ID NO: 1072 - protein, 10 aa, Homo sapiens
QSYDTNNHAV

SEQ ID NO: 1073 - protein, 10 aa, Homo sapiens
CSYAGHSAYV

SEQ ID NO: 1074 - protein, 11 aa, Homo sapiens
STWDSSLSAVV

SEQ ID NO: 1075 - protein, 11 aa, Homo sapiens
SVWDSSLSAWV

SEQ ID NO: 1076 - protein, 11 aa, Homo sapiens
QVWDSGNDRPL

SEQ ID NO: 1077 - protein, 9 aa, Homo sapiens
QQYGSSPQV

SEQ ID NO: 1078 - protein, 9 aa, Homo sapiens
QQYDGVPRT

SEQ ID NO: 1079 - protein, 11 aa, Homo sapiens
QSYDSRLSASL

SEQ ID NO: 1080 - protein, 9 aa, Homo sapiens
QQYDSSPYT

SEQ ID NO: 1081 - protein, 11 aa, Homo sapiens
ASWDDNLSGWV

SEQ ID NO: 1082 - protein, 9 aa, Homo sapiens
ETWDTKIHV

SEQ ID NO: 1083 - protein, 10 aa, Artificial Sequence
  Synthetic peptide
GTETSQVAPA

SEQ ID NO: 1084 - protein, 6 aa, Artificial Sequence
  Synthetic 6xHis tag
HHHHHH

SEQ ID NO: 1085 - protein, 4 aa, Influenza A virus
INGW

SEQ ID NO: 1086 - protein, 4 aa, Influenza A virus
IDGW

SEQ ID NO: 1087 - protein, 4 aa, Influenza A virus
VAGW

SEQ ID NO: 1088 - protein, 4 aa, Influenza A virus
VDGW

SEQ ID NO: 1089 - protein, 4 aa, Influenza A virus
IAGW

SEQ ID NO: 1090 - protein, 87 aa, Homo sapiens
KKPGSSVKVSCKASGGTFSSYAISWVRQAPGQGLEWMGGIIPMFGTPNYAQKFQGRVTITADESTSTAYMELSSLRSEDTAVYYCAR

SEQ ID NO: 1091 - protein, 87 aa, Homo sapiens
KKPGSSVKVSCKASGGTFSSYAISWVRQAPGQGLEWMGGIIPIFGTPNYAQKFQGRVTITADESTSTAYMELSSLRSEDTAVYYCAR

SEQ ID NO: 1092 - protein, 108 aa, Homo sapiens
KKPGSSVKVSCTSSEVTFSSFAISWVRQAPGQGLEWLGGISPMFGTPNYAQKFQGRVTITADQSTRTAYMDLRSLRSEDTAVYYCARSPSYICSGGTCVFDHWGQGTL

SEQ ID NO: 1093 - protein, 104 aa, Homo sapiens
KKPGSSVKVSCKASGGTFSAYAFTWVRQAPGQGLEWMGGIIGMFGTANYAQKFQGRVTITADELTSTAYMELSSLTSEDTALYYCARGLYYYESSFDYWGQGTL

SEQ ID NO: 1094 - protein, 107 aa, Homo sapiens
KKPGSSVKVSCKASGGPFSMTAFTWLRQAPGQGLEWMGGISPIFRTPKYAQKFQGRVTITADESTNTANMELTSLKSEDTAVYYCARTLSSYQPNNDAFAIWGQGTM

SEQ ID NO: 1095 - protein, 106 aa, Homo sapiens
KKPGASVKVSCKTSGVTFSSYAISWVRQAPGQGLEWMGGIIGVFGVPKYAQKFQGRVTITADKPTSTVYMELNSLRAEDTAVYYCAREPGYYVGKNGFDVWGQGTM

SEQ ID NO: 1096 - protein, 105 aa, Homo sapiens
KKPGSSVKVSCKAPGGIFNTNAFSWVRQAPGQGLEWVGGVIPLFRTASYAQNVQGRVTITADESTNTAYMELTSLRSADTAVYYCARSSGYHFRSHFDSWGLGTL

SEQ ID NO: 1097 - protein, 110 aa, Homo sapiens
RKPGASVKVSCKASGYTFTGYYIHWVRQAPGQGLEWMGWINPMTGGTNYAQKFQVWVTMTRDTSINTAYMEVTRLTSDDTAVYYCARGASVLRYFDWQPEALDIWGLGTT

SEQ ID NO: 1098 - protein, 8 aa, Homo sapiens
GGTFSSYA

SEQ ID NO: 1099 - protein, 8 aa, Homo sapiens
GGTFSSYA

SEQ ID NO: 1100 - protein, 8 aa, Homo sapiens
EVTFSSFA

SEQ ID NO: 1101 - protein, 8 aa, Homo sapiens
GGTFSAYA

SEQ ID NO: 1102 - protein, 8 aa, Homo sapiens
GGPFSMTA

SEQ ID NO: 1103 - protein, 8 aa, Homo sapiens
GVTFSSYA

SEQ ID NO: 1104 - protein, 8 aa, Homo sapiens
GGIFNTNA

SEQ ID NO: 1105 - protein, 8 aa, Homo sapiens
GYTFTGYY

SEQ ID NO: 1106 - protein, 8 aa, Homo sapiens
IIPMFGTP

SEQ ID NO: 1107 - protein, 8 aa, Homo sapiens
IIPIFGTP

SEQ ID NO: 1108 - protein, 8 aa, Homo sapiens
ISPMFGTP

SEQ ID NO: 1109 - protein, 8 aa, Homo sapiens
IIGMFGTA

SEQ ID NO: 1110 - protein, 8 aa, Homo sapiens
ISPIFRTP

SEQ ID NO: 1111 - protein, 8 aa, Homo sapiens
IIGVFGVP

SEQ ID NO: 1112 - protein, 8 aa, Homo sapiens
VIPLFRTA

SEQ ID NO: 1113 - protein, 8 aa, Homo sapiens
INPMTGGT

SEQ ID NO: 1114 - protein, 17 aa, Homo sapiens
ARSPSYICSGGTCVFDH

SEQ ID NO: 1115 - protein, 13 aa, Homo sapiens
ARGLYYYESSFDY

SEQ ID NO: 1116 - protein, 16 aa, Homo sapiens
ARTLSSYQPNNDAFAI

SEQ ID NO: 1117 - protein, 15 aa, Homo sapiens
AREPGYYVGKNGFDV

SEQ ID NO: 1118 - protein, 14 aa, Homo sapiens
ARSSGYHFRSHFDS

SEQ ID NO: 1119 - protein, 19 aa, Homo sapiens
ARGASVLRYFDWQPEALDI

SEQ ID NO: 1120 - protein, 8 aa, Homo sapiens
SGNIAANY

SEQ ID NO: 1121 - protein, 9 aa, Homo sapiens
SSDVGGYNS

SEQ ID NO: 1122 - protein, 8 aa, Homo sapiens
SNNVGNQG

SEQ ID NO: 1123 - protein, 8 aa, Homo sapiens
SNNVGHQG

SEQ ID NO: 1124 - protein, 6 aa, Homo sapiens
NIGGYS

SEQ ID NO: 1125 - protein, 7 aa, Homo sapiens
QSSVSSY

SEQ ID NO: 1126 - protein, 7 aa, Homo sapiens
QSLSSKY

SEQ ID NO: 1127 - protein, 8 aa, Homo sapiens
SSNIGSNT

SEQ ID NO: 1128 - protein, 6 aa, Homo sapiens
QSISSY

SEQ ID NO: 1129 - protein, 8 aa, Homo sapiens
TSNIGRNH

SEQ ID NO: 1130 - protein, 3 aa, Homo sapiens
EDD

SEQ ID NO: 1131 - protein, 3 aa, Homo sapiens
EVT

SEQ ID NO: 1132 - protein, 3 aa, Homo sapiens
RNN

SEQ ID NO: 1133 - protein, 3 aa, Homo sapiens
RNG

SEQ ID NO: 1134 - protein, 3 aa, Homo sapiens
DDK

SEQ ID NO: 1135 - protein, 3 aa, Homo sapiens
DAS

SEQ ID NO: 1136 - protein, 3 aa, Homo sapiens
GAS

SEQ ID NO: 1137 - protein, 3 aa, Homo sapiens
SNN

SEQ ID NO: 1138 - protein, 3 aa, Homo sapiens
AAS

SEQ ID NO: 1139 - protein, 3 aa, Homo sapiens
SNE

SEQ ID NO: 1140 - protein, 10 aa, Homo sapiens
QTYDTNNHAV

SEQ ID NO: 1141 - protein, 10 aa, Homo sapiens
CSYAGHSAYV

SEQ ID NO: 1142 - protein, 11 aa, Homo sapiens
STWDSSLSAVV

SEQ ID NO: 1143 - protein, 11 aa, Homo sapiens
SVWDSSLSAWV

SEQ ID NO: 1144 - protein, 11 aa, Homo sapiens
QVWDSGNDRPL

SEQ ID NO: 1145 - protein, 8 aa, Homo sapiens
QQYGSSPQ

SEQ ID NO: 1146 - protein, 9 aa, Homo sapiens
QQYDGVPRT

SEQ ID NO: 1147 - protein, 11 aa, Homo sapiens
QSYDSRLSASL

SEQ ID NO: 1148 - protein, 9 aa, Homo sapiens
QQYDSSPYT

SEQ ID NO: 1149 - protein, 11 aa, Homo sapiens
ASWDDNLSGWV

SEQ ID NO: 1150 - protein, 2 aa, Homo sapiens
AR

SEQ ID NO: 1151 - protein, 10 aa, Homo sapiens
QVQLVQGAEV

SEQ ID NO: 1152 - protein, 5 aa, Homo sapiens
VTVSS

SEQ ID NO: 1153 - DNA, 354 bp, Homo sapiens
caggtccagctcgtccagtccggcgctgaagtggtgaaacccggggcatccgtcaaagtctcttgtaaggctagtggctacaccttcacatcctactggatgcattgggtgaaacaggcacctggccagggactcgaatggatcggagccgtgtctcctggaaattccgacacctcctacaacgaaaaattcaagggcaaggcaaccctcactgtggatactagtgcttctaccgcctacatggaactctcatctctccgctctgaggacactgccgtctactactgtactcggtcacgatacgggaacaacgctctcgattactggggacagggcacactggtcactgtctct

SEQ ID NO: 1154 - protein, 118 aa, Homo sapiens
QVQLVQSGAEVVKPGASVKVSCKASGYTFTSYWMHWVKQAPGQGLEWIGAVSPGNSDTSYNEKFKGKATLTVDTSASTAYMELSSLRSEDTAVYYCTRSRYGNNALDYWGQGTLVTVS

SEQ ID NO: 1155 - DNA, 321 bp, Homo sapiens
gatattcagctcacacagagcccatcttctctgtctgcttctgtgggcgatcgagtgacaatcacttgtcgggctagtcagggcatttctagcaacattgtgtggctccagcagaaacctggcaaagccccaaaaggcctcatctaccacggaaccaacctggaatctggcgtgccatctcggtttagtggatctggatccgggaccgattacacactcaccatctcttcactggaacctgaggatttcgccacctactactgtgtccagtactcccagtttccacccacttttggacagggaaccaaactcgagatcaaa

SEQ ID NO: 1156 - protein, 107 aa, Homo sapiens
DIQLTQSPSSLSASVGDRVTITCRASQGISSNIVWLQQKPGKAPKGLIYHGTNLESGVPSRFSGSGSGTDYTLTISSLEPEDFATYYCVQYSQFPPTFGQGTKLEIK

SEQ ID NO: 1157 - protein, 8 aa, Homo sapiens
GYTFTSYW

SEQ ID NO: 1158 - protein, 8 aa, Homo sapiens
VSPGNSDT

SEQ ID NO: 1159 - protein, 12 aa, Homo sapiens
TRSRYGNNALDY

SEQ ID NO: 1160 - protein, 9 aa, Homo sapiens
QGISSNIVW

SEQ ID NO: 1161 - protein, 3 aa, Homo sapiens
HGT

SEQ ID NO: 1162 - protein, 9 aa, Homo sapiens
VQYSQFPPT

SEQ ID NO: 1163 - DNA, 354 bp, Homo sapiens
caggtccagctcgtccagtccggcgctgaagtggtgaaacccggggcatccgtcaaagtctcttgtaaggctagtggctacaccttcacatcctactggatgcattgggtgaaacaggcacctggccagggactcgaatggatcggagccgtgtctcctggaaattccgacacctcctacaacgaaaaattcaagggcaaggcaaccctcactgtggacaaatctgcctctaccgcctacatggaactctcatctctccgctctgaggatactgctgtgtactactgtacccggtcacgatacggcaataacgccctcgattactgggggcagggaactctggtcactgtgtct

SEQ ID NO: 1164 - protein, 118 aa, Homo sapiens
QVQLVQSGAEVVKPGASVKVSCKASGYTFTSYWMHWVKQAPGQGLEWIGAVSPGNSDTSYNEKFKGKATLTVDKSASTAYMELSSLRSEDTAVYYCTRSRYGNNALDYWGQGTLVTVS

SEQ ID NO: 1165 - DNA, 357 bp, Mus musculus
caggtccagctgcagcagtctgggactgtgctcgcaaggcctggggcttcagtgaagatgtcctgcaaggcttctggctacacctttaccagttactggatgcactgggtaaaacagaggcctggacagggtctggaatggattggcgctgtttctcctggaaatagtgatactagctacaaccagaagttcaagggcaaggccacactgactgcagtcacatccaccagcactgcctacatggagttcagcagcctgacaaatgaggactctgcggtctattactgtacaagaagtcgatatggtaacaatgctttggactactggggccaagggaccacggtcaccgtctcctca

SEQ ID NO: 1166 - protein, 119 aa, Mus musculus
QVQLQQSGTVLARPGASVKMSCKASGYTFTSYWMHWVKQRPGQGLEWIGAVSPGNSDTSYNQKFKGKATLTAVTSTSTAYMEFSSLTNEDSAVYYCTRSRYGNNALDYWGQGTTVTVSS

SEQ ID NO: 1167 - DNA, 330 bp, Mus musculus
gacatcgagctcacccagtctcctgcttccttagctgtatctctggggcagagggccaccatctcatacagggccagcaaaagtgtcagtacatctggctatagttatatgcactggaaccaacagaaaccaggacagccacccagactcctcatctatcttgtatccaacctagaatctggggtccctgccaggttcagtggcagtgggtctgggacagacttcaccctcaacatccatcctgtggaggaggaggatgctgcaacctattactgtcagcacattaagggagcttacacgttcggaggggggaccaagctggaaataaaa

SEQ ID NO: 1168 - DNA, 330 bp, Mus musculus
gacatcgagctcactcagtctccagcttctttggctgtgtctctagggcagagggccaccatctcctgcagagccagcgcaagtgttgataattatggcattagttttatgaactggttccaacagaaaccaggacagccacccaaactcctcatctatgctgcatccaaccaaggatccggggtccctgccaggtttagtggcagtgggtctgggacagacttcagcctcaacatccatcctatggaggaggatgatactgcaacctattactgtcagcacattaagggagcttacacgttcggaggggggaccaagctggagctgaaa

SEQ ID NO: 1169 - DNA, 321 bp, Mus musculus
gacatcgagctcactcagtctccatcctccatgtctgtatctctgggagacacagtcaacatcacttgccgtgcaagtcagggcattagcagtaatatagtgtggttgcagcagaaaccagggaagtcatttaagggcctgatctatcatgggaccaatttggaagatggagttccatcaaggttcagtggcagtggatctggagccgattattctctcaccatcagcagcctggaatctgaggattttgcagactattactgtgtacagtattctcagtttcctcccacgttcggctcggggaccaagctggagctgaaa

SEQ ID NO: 1170 - protein, 107 aa, Mus musculus
DIELTQSPSSMSVSLGDTVNITCRASQGISSNIVWLQQKPGKSFKGLIYHGTNLEDGVPSRFSGSGSGADYSLTISSLESEDFADYYCVQYSQFPPTFGSGTKLELK

SEQ ID NO: 1171 - protein, 118 aa, Homo sapiens; identical to SEQ ID NO: 1164

SEQ ID NO: 1172 - protein, 118 aa, Mus musculus
QVQLQQSGTVLARPGASVKMSCKASGYTFTSYWMHWVKQRPGQGLEWIGAVSPGNSDTSYNQKFKGKATLTAVTSTSTAYMEFSSLTNEDSAVYYCTRSRYGNNALDYWGQGTTVTVS

SEQ ID NO: 1173 - protein, 107 aa, Homo sapiens
DIQMTQSPSSLSASVGDRVTITCRASQGISSNIVWYQQKPGKAPKGLIYHGTNLESGVPSRFSGSGSGTDYTLTISSLQPEDFATYYCVQYSQFPPTFGQGTKLEIK

SEQ ID NO: 1174 - protein, 98 aa, Homo sapiens
QVQLVQSGAEVKKPGSSVKVSCKASGGTFSSYAISWVRQAPGQGLEWMGGIIPIFGTANYAQKFQGRVTITADESTSTAYMELSSLRSEDTAVYYCAR

SEQ ID NO: 1175 - DNA, 294 bp, Homo sapiens
caggtgcagctggtgcagtctggggctgaggtgaagaagcctgggtcctcggtgaaggtctcctgcaaggcttctggaggcaccttcagcagctatgctatcagctgggtgcgacaggcccctggacaagggcttgagtggatgggagggatcatccctatctttggtacagcaaactacgcacagaagttccagggcagagtcacgattaccgcggacgaatccacgagcacagcctacatggagctgagcagcctgagatctgaggacacggccgtgtattactgtgcgaga

SEQ ID NO: 1176 - protein, 8 aa, Artificial Sequence
  Chemically synthesized peptide
ISPMFGTP

SEQ ID NO: 1177 - protein, 8 aa, Artificial Sequence
  Chemically synthesized peptide
IIPIFGTA

SEQ ID NO: 1178 - protein, 8 aa, Artificial Sequence
  Chemically synthesized peptide
ISPIFGTA

SEQ ID NO: 1179 - protein, 8 aa, Artificial Sequence
  Chemically synthesized peptide
  MISC_FEATURE (2)..(2): wherein said Xaa is an Isoleucine or a Serine
  MISC_FEATURE (4)..(4): wherein said Xaa is an Isoleucine or a Methionine
IXPXFGTA

SEQ ID NO: 1180 - protein, 8 aa, Artificial Sequence
  Chemically synthesized peptide
  MISC_FEATURE (1)..(1): wherein said Xaa is a Glycine or a Glutamic acid
  MISC_FEATURE (2)..(2): wherein said Xaa is a Glycine or a Valine
XXTFSSYA

SEQ ID NO: 1181 - protein, 8 aa, Artificial Sequence
  Chemically synthesized peptide
  MISC_FEATURE (2)..(2): wherein said Xaa is an Isoleucine or a Serine
  MISC_FEATURE (4)..(4): wherein said Xaa is an Isoleucine or a Methionine
IXPXFGTA

SEQ ID NO: 1182 - DNA, 354 bp, Artificial Sequence
  Variable heavy chain
caggtgcagctggtgcagagcggagccgaggtgaagaagcctggagcttccgtcaaggtgtcctgcaaggccagcggctacaccttcgccagccaatggatgcactggatgcggcaggcacctggacagggcctcgaatggatcggctggatcaaccccggcaacgtgaacaccaagtacaacgagaagttcaagggcagggccaccctgaccgtggacaccagcaccaacaccgcctacatggaactgagcagcctgcggagcgaggacaccgccgtgtactactgcgccagaagcacctggtaccggccgctggactactggggccagggcaccctggtgaccgtgagcagc

SEQ ID NO: 1183 - protein, 118 aa, Artificial Sequence
  Variable heavy chain
QVQLVQSGAEVKKPGASVKVSCKASGYTFASQWMHWMRQAPGQGLEWIGWINPGNVNTKYNEKFKGRATLTVDTSTNTAYMELSSLRSEDTAVYYCARSTWYRPLDYWGQGTLVTVSS

SEQ ID NO: 1184 - DNA, 336 bp, Artificial Sequence
  Variable light chain
gacatcgtgatgacccagagccccgacagcctggccgtgagcctgggcgagcgggccaccatcaactgcaagagcagccagagcatcctgtacagcagcaaccagaagaactacctggcctggtatcagcagaagcccggccagagccccaagctgctgatctactgggccagcacccgggagagcggcgtgcccgaccggtttagcggcagcggctccggcaccgacttcaccctgaccatcagcagcctgcaggccgaggacgtggccgtgtactactgccaccagtacatcagcagctacaccttcggccagggcacaaagctggaaatcaag

SEQ ID NO: 1185 - protein, 112 aa, Artificial Sequence
  Variable light chain
DIVMTQSPDSLAVSLGERATINCKSSQSILYSSNQKNYLAWYQQKPGQSPKLLIYWASTRESGVPDRFSGSGSGTDFTLTISSLQAEDVAVYYCHQYISSYTFGQGTKLEIK

SEQ ID NO: 1186 - DNA, 354 bp, Artificial Sequence
  Variable heavy chain
caggtgcagctggtgcagagcggagccgaggtgaagaagcctggagcttccgtcaaggtgtcctgcaaggccagcggctacaccttcgccagcagctggatgcactggatgcggcaggcacctggacagggcctcgaatggatcggctggatcaaccccggcaacgtgaacaccaagtacaacgagaagttcaagggcagggccaccctgaccgtggacaccagcaccaacaccgcctacatggaactgagcagcctgcggagcgaggacaccgccgtgtactactgcgccagaagcacgtggtatcggccgaatgactactggggccagggcaccctggtgaccgtgagcagc

SEQ ID NO: 1187 - protein, 118 aa, Artificial Sequence
  Variable heavy chain
QVQLVQSGAEVKKPGASVKVSCKASGYTFASSWMHWMRQAPGQGLEWIGWINPGNVNTKYNEKFKGRATLTVDTSTNTAYMELSSLRSEDTAVYYCARSTWYRPNDYWGQGTLVTVSS

SEQ ID NO: 1188 - DNA, 336 bp, Artificial Sequence
  Variable light chain
gacatcgtgatgacccagagccccgacagcctggccgtgagcctgggcgagcgggccaccatcaactgcaagagcagccagagcatcctgtacagcagcaaccagaagaactacctggcctggtatcagcagaagcccggccagagccccaagctgctgatctactgggccagcacccgggagagcggcgtgcccgaccggtttagcggcagcggctccggcaccgacttcaccctgaccatcagcagcctgcaggccgaggacgtggccgtgtactactgccaccagtacaaaagcagctacaccttcggccagggcacaaagctggaaatcaag

SEQ ID NO: 1189 - protein, 112 aa, Artificial Sequence
  Variable light chain
DIVMTQSPDSLAVSLGERATINCKSSQSILYSSNQKNYLAWYQQKPGQSPKLLIYWASTRESGVPDRFSGSGSGTDFTLTISSLQAEDVAVYYCHQYKSSYTFGQGTKLEIK

SEQ ID NO: 1190 - DNA, 354 bp, Artificial Sequence
  Variable heavy chain
caggtgcagctggtgcagagcggagccgaggtgaagaagcctggagcttccgtcaaggtgtcctgcaaggccagcggctacaccttcgccagcagctggatgcactggatgcggcaggcacctggacagggcctcgaatggatcggctggatcaaccccggcaacgtgaacaccaagtacaacgagaagttcaagggcagggccaccctgaccgtggacaccagcaccaacaccgcctacatggaactgagcagcctgcggagcgaggacaccgccgtgtactactgcgccagaaccacccgttatcggcccctggactactggggccagggcaccctggtgaccgtgagcagc

SEQ ID NO: 1191 - protein, 118 aa, Artificial Sequence
  Variable heavy chain
QVQLVQSGAEVKKPGASVKVSCKASGYTFASSWMHWMRQAPGQGLEWIGWINPGNVNTKYNEKFKGRATLTVDTSTNTAYMELSSLRSEDTAVYYCARTTRYRPLDYWGQGTLVTVSS

SEQ ID NO: 1192 - protein, 336 aa, Artificial Sequence
  Variable light chain
GACATCGTGATGACCCAGAGCCCCGACAGCCTGGCCGTGAGCCTGGGCGAGCGGGCCACCATCAACTGCAAGAGCAGCCAGAGCATCCTGTACAGCAGCAACCAGAAGAACTACCTGGCCTGGTATCAGCAGAAGCCCGGCCAGAGCCCCAAGCTGCTGATCTACTGGGCCAGCACCCGGGAGAGCGGCGTGCCCGACCGGTTTAGCGGCAGCGGCTCCGGCACCGACTTCACCCTGACCATCAGCAGCCTGCAGGCCGAGGACGTGGCCGTGTACTACTGCCACCAGTACCGTAGCAGCTACACCTTCGGCCAGGGCACAAAGCTGGAAATCAAG

SEQ ID NO: 1193 - protein, 112 aa, Artificial Sequence
  Variable light chain
DIVMTQSPDSLAVSLGERATINCKSSQSILYSSNQKNYLAWYQQKPGQSPKLLIYWASTRESGVPDRFSGSGSGTDFTLTISSLQAEDVAVYYCHQYRSSYTFGQGTKLEIK

SEQ ID NO: 1194 - DNA, 354 bp, Artificial Sequence
  Variable heavy chain
caggtgcagctggtgcagagcggagccgaggtgaagaagcctggagcttccgtcaaggtgtcctgcaaggccagcggctacaccttcgccagccaatatatgcactggatgcggcaggcacctggacagggcctcgaatggatcggctggatcaaccccggcaacgtgaacaccaagtacaacgagaagttcaagggcagggccaccctgaccgtggacaccagcaccaacaccgcctacatggaactgagcagcctgcggagcgaggacaccgccgtgtactactgcgccagactgacctattatcggccgccggactactggggccagggcaccctggtgaccgtgagcagc

SEQ ID NO: 1195 - protein, 118 aa, Artificial Sequence
  Variable heavy chain
QVQLVQSGAEVKKPGASVKVSCKASGYTFASQYMHWMRQAPGQGLEWIGWINPGNVNTKYNEKFKGRATLTVDTSTNTAYMELSSLRSEDTAVYYCARLTYYRPPDYWGQGTLVTVSS

SEQ ID NO: 1196 - DNA, 336 bp, Artificial Sequence
  Variable light chain
gacatcgtgatgacccagagccccgacagcctggccgtgagcctgggcgagcgggccaccatcaactgcaagagcagccagagcatcctgtacagcagcaaccagaagaactacctggcctggtatcagcagaagcccggccagagccccaagctgctgatctactgggccagcacccgggagagcggcgtgcccgaccggtttagcggcagcggctccggcaccgacttcaccctgaccatcagcagcctgcaggccgaggacgtggccgtgtactactgccaccagtactatagcagctacaccttcggccagggcacaaagctggaaatcaag

SEQ ID NO: 1197 - protein, 112 aa, Artificial Sequence
  Variable light chain
DIVMTQSPDSLAVSLGERATINCKSSQSILYSSNQKNYLAWYQQKPGQSPKLLIYWASTRESGVPDRFSGSGSGTDFTLTISSLQAEDVAVYYCHQYYSSYTFGQGTKLEIK

SEQ ID NO: 1198 - DNA, 354 bp, Artificial Sequence
  Variable heavy chain
caggtgcagctggtgcagagcggagccgaggtgaagaagcctggagcttccgtcaaggtgtcctgcaaggccagcggctacaccttcgccagcgcgtggatgcactggatgcggcaggcacctggacagggcctcgaatggatcggctggatcaaccccggcaacgtgaacaccaagtacaacgagaagttcaagggcagggccaccctgaccgtggacaccagcaccaacaccgcctacatggaactgagcagcctgcggagcgaggacaccgccgtgtactactgcgccagaagcacgtattaccggccgctggactactggggccagggcaccctggtgaccgtgagcagc

SEQ ID NO: 1199 - protein, 118 aa, Artificial Sequence
  Variable heavy chain
QVQLVQSGAEVKKPGASVKVSCKASGYTFASAWMHWMRQAPGQGLEWIGWINPGNVNTKYNEKFKGRATLTVDTSTNTAYMELSSLRSEDTAVYYCARSTYYRPLDYWGQGTLVTVSS

SEQ ID NO: 1200 - DNA, 336 bp, Artificial Sequence
  Variable light chain
gacatcgtgatgacccagagccccgacagcctggccgtgagcctgggcgagcgggccaccatcaactgcaagagcagccagagcatcctgtacagcagcaaccagaagaactacctggcctggtatcagcagaagcccggccagagccccaagctgctgatctactgggccagcacccgggagagcggcgtgcccgaccggtttagcggcagcggctccggcaccgacttcaccctgaccatcagcagcctgcaggccgaggacgtggccgtgtactactgccaccagtacatgagcagctacaccttcggccagggcacaaagctggaaatcaag

SEQ ID NO: 1201 - protein, 112 aa, Artificial Sequence
  Variable light chain
DIVMTQSPDSLAVSLGERATINCKSSQSILYSSNQKNYLAWYQQKPGQSPKLLIYWASTRESGVPDRFSGSGSGTDFTLTISSLQAEDVAVYYCHQYMSSYTFGQGTKLEIK

SEQ ID NO: 1202 - protein, 8 aa, Artificial Sequence
  Variable heavy chain, CDR1
GYTFASYY

SEQ ID NO: 1203 - protein, 8 aa, Artificial Sequence
  Variable heavy chain, CDR1
GYTFASQW

SEQ ID NO: 1204 - protein, 8 aa, Artificial Sequence
  Variable heavy chain, CDR1
GYTFASSW

SEQ ID NO: 1205 - protein, 8 aa, Artificial Sequence
  Variable heavy chain, CDR1
GYTFASQY

SEQ ID NO: 1206 - protein, 8 aa, Artificial Sequence
  Variable heavy chain, CDR1
GYTFASAW

SEQ ID NO: 1207 - protein, 12 aa, Artificial Sequence
  Variable light chain, CDR1
QSILYSSNQKNY

SEQ ID NO: 1208 - protein, 8 aa, Artificial Sequence
  Variable heavy chain, CDR2
INPGNVNT

SEQ ID NO: 1209 - protein, 6 aa, Artificial Sequence
  Variable light chain, CDR2
WASTRE

SEQ ID NO: 1210 - protein, 9 aa, Artificial Sequence
  Variable heavy chain, CDR3
STYYRPLDY

SEQ ID NO: 1211 - protein, 9 aa, Artificial Sequence
  Variable heavy chain, CDR3
STWYRPLDY

SEQ ID NO: 1212 - protein, 9 aa, Artificial Sequence
  Variable heavy chain, CDR3
STWYRPNDY

SEQ ID NO: 1213 - protein, 9 aa, Artificial Sequence
  Variable heavy chain, CDR3
TTRYRPLDY

SEQ ID NO: 1214 - protein, 9 aa, Artificial Sequence
  Variable heavy chain, CDR3
LTYYRPPDY

SEQ ID NO: 1215 - protein, 8 aa, Artificial Sequence
  Variable light chain, CDR3
HQYLSSYT

SEQ ID NO: 1216 - protein, 8 aa, Artificial Sequence
  Variable light chain, CDR3
HQYISSYT

SEQ ID NO: 1217 - protein, 8 aa, Artificial Sequence
  Variable light chain, CDR3
HQYKSSYT

SEQ ID NO: 1218 - protein, 8 aa, Artificial Sequence
  Variable light chain, CDR3
HQYRSSYT

SEQ ID NO: 1219 - protein, 8 aa, Artificial Sequence
  Variable light chain, CDR3
HQYYSSYT

SEQ ID NO: 1220 - protein, 8 aa, Artificial Sequence
  Variable light chain, CDR3
HQYMSSYT

SEQ ID NO: 1221 - DNA, 27 bp, Artificial Sequence
  Chemically synthesized primer
tctgagtaggtgtcattctattctggg

SEQ ID NO: 1222 - DNA, 25 bp, Artificial Sequence
  Chemically synthesized primer
cactaggggttcctagatctctccc

SEQ ID NO: 1223 - protein, 26 aa, Artificial Sequence
  Chemically synthesized probe
TCTTCCCAATCCTCCCCCTTGCTGTC

SEQ ID NO: 1224 - protein, 123 aa, Artificial Sequence
  Synthetic Polypeptide
TRVLSQVQLVQSGAEVKKPGASVKVSCKASGYTFSGYSTHWLRQVPGQGLEWIGWDNPSSGDTTYAENFRGRVTLTRDTSITTDYLEVRGLRSDDTAVYYCARGGDDYSFDHWGQGTLVTVSS

SEQ ID NO: 1225 - DNA, 354 bp, Artificial Sequence
  Synthetic Oligonucleotide
  misc_feature (62)..(62): n is a, c, g, or t
  misc_feature (90)..(90): n is a, c, g, or t
  misc_feature (120)..(120): n is a, c, g, or t
  misc_feature (182)..(182): n is a, c, g, or t
  misc_feature (190)..(192): n is a, c, g, or t
  misc_feature (208)..(208): n is a, c, g, or t
  misc_feature (256)..(256): n is a, c, g, or t
  misc_feature (279)..(279): n is a, c, g, or t
  misc_feature (288)..(288): n is a, c, g, or t
  misc_feature (297)..(297): n is a, c, g, or t
caggtgcagctggtgcagtctggggctgaggtgaagaagcctggggcctcagtgaaagtctnctgcaaggcttctggatacaccttcagnggctactctacacactggctgcgacaggtncctggacagggacttgagtggattggatgggacaaccctagtagtggtgacacgacctatgnagagaatnnncggggcagggtcaccntgaccagggacacgtccatcaccacagattacttggaagtgaggggtntaagatctgacgacacggccgtntattattgngccagaggnggagatgactacagctttgaccattggggtcagggcaccctggtcaccgtctcctca

SEQ ID NO: 1226 - protein, 105 aa, Artificial Sequence
  Synthetic Polypeptide
SSELTQDPAVSVALGQTVRITCRGDSLRSYYASWYQQKPGQAPVLVIYGENNRPSGIPDRFSGSSSGDTASLTITGAQAEDEADYYCNSRDSSDHLLLFGQGTKL

SEQ ID NO: 1227 - DNA, 327 bp, Artificial Sequence
  Synthetic Oligonucleotide
tcttctgagctgactcaggacccagctgtgtctgtggccttgggacagacagtcaggatcacatgccgaggagacagcctcagaagttattatgcaagctggtaccaacagaagccaggacaggcccctgtacttgtcatctatggtgaaaacaaccgaccctcagggatcccagaccgattctctggctccagctcaggagacacagcttccttgaccatcactggggctcaggcggaagatgaggctgactattactgtaactcccgggacagcagtgatcaccttctcctattcggtggagggaccaagttgaccgtcctaggt

SEQ ID NO: 1228 - protein, 330 aa, Homo sapiens
ASTKGPSVFPLAPSSKSTSGGTAALGCLVKDYFPEPVTVSWNSGALTSGVHTFPAVLQSSGLYSLSSVVTVPSSSLGTQTYICNVNHKPSNTKVDKKAEPKSCDKTHTCPPCPAPELLGGPSVFLFPPKPKDTLMISRTPEVTCVVVDVSHEDPEVKFNWYVDGVEVHNAKTKPREEQYNSTYRVVSVLTVLHQDWLNGKEYKCKVSNKALPAPIEKTISKAKGQPREPQVYTLPPSRDELTKNQVSLTCLVKGFYPSDIAVEWESNGQPENNYKTTPPVLDSDGSFFLYSKLTVDKSRWQQGNVFSCSVMHEALHNHYTQKSLSLSPGK

SEQ ID NO: 1229 - DNA, 992 bp, Homo sapiens
ctagcaccaagggcccatcggtcttccccctggcaccctcctccaagagcacctctgggggcacagcggccctgggctgcctggtcaaggactacttccccgaaccggtgacggtgtcgtggaactcaggcgccctgaccagcggcgtgcacaccttcccggctgtcctacagtcctcaggactctactccctcagcagcgtggtgaccgtgccctccagcagcttgggcacccagacctacatctgcaacgtgaatcacaagcccagcaacaccaaggtggacaagaaagcagagcccaaatcttgtgacaaaactcacacatgcccaccgtgcccagcacctgaactcctggggggaccgtcagtcttcctcttccccccaaaacccaaggacaccctcatgatctcccggacccctgaggtcacatgcgtggtggtggacgtgagccacgaagaccctgaggtcaagttcaactggtacgtggacggcgtggaggtgcataatgccaagacaaagccgcgggaggagcagtacaacagcacgtaccgtgtggtcagcgtcctcaccgtcctgcaccaggactggctgaatggcaaggagtacaagtgcaaggtctccaacaaagccctcccagcccccatcgagaaaaccatctccaaagccaaagggcagccccgagaaccacaggtgtacaccctgcccccatcccgggatgagctgaccaagaaccaggtcagcctgacctgcctggtcaaaggcttctatcccagcgacatcgccgtggagtgggagagcaatgggcagccggagaacaactacaagaccacgcctcccgtgctggactccgacggctccttcttcctctacagcaagctcaccgtggacaagagcaggtggcagcaggggaacgtcttctcatgctccgtgatgcatgaggctctgcacaaccactacacgcagaagagcctctccctgtctccgggtaaatga

SEQ ID NO: 1230 - protein, 330 aa, Artificial Sequence
  Synthetic Polypeptide
ASTKGPSVFPLAPSSKSTSGGTAALGCLVKDYFPEPVTVSWNSGALTSGVHTFPAVLQSSGLYSLSSVVTVPSSSLGTQTYICNVNHKPSNTKVDKKAEPKSCDKTHTCPPCPAPEAAGGPSVFLFPPKPKDTLMISRTPEVTCVVVDVSHEDPEVKFNWYVDGVEVHNAKTKPREEQYNSTYRVVSVLTVLHQDWLNGKEYKCKVSNKALPAPIEKTISKAKGQPREPQVYTLPPSRDELTKNQVSLTCLVKGFYPSDIAVEWESNGQPENNYKTTPPVLDSDGSFFLYSKLTVDKSRWQQGNVFSCSVMHEALHNHYTQKSLSLSPGK

SEQ ID NO: 1231 - DNA, 992 bp, Artificial Sequence
  Synthetic Oligonucleotide
ctagcaccaagggcccatcggtcttccccctggcaccctcctccaagagcacctctgggggcacagcggccctgggctgcctggtcaaggactacttccccgaaccggtgacggtgtcgtggaactcaggcgccctgaccagcggcgtgcacaccttcccggctgtcctacagtcctcaggactctactccctcagcagcgtggtgaccgtgccctccagcagcttgggcacccagacctacatctgcaacgtgaatcacaagcccagcaacaccaaggtggacaagaaagcagagcccaaatcttgtgacaaaactcacacatgcccaccgtgcccagcacctgaagccgccgggggaccgtcagtcttcctcttccccccaaaacccaaggacaccctcatgatctcccggacccctgaggtcacatgcgtggtggtggacgtgagccacgaagaccctgaggtcaagttcaactggtacgtggacggcgtggaggtgcataatgccaagacaaagccgcgggaggagcagtacaacagcacgtaccgtgtggtcagcgtcctcaccgtcctgcaccaggactggctgaatggcaaggagtacaagtgcaaggtctccaacaaagccctcccagcccccatcgagaaaaccatctccaaagccaaagggcagccccgagaaccacaggtgtacaccctgcccccatcccgggatgagctgaccaagaaccaggtcagcctgacctgcctggtcaaaggcttctatcccagcgacatcgccgtggagtgggagagcaatgggcagccggagaacaactacaagaccacgcctcccgtgctggactccgacggctccttcttcctctacagcaagctcaccgtggacaagagcaggtggcagcaggggaacgtcttctcatgctccgtgatgcatgaggctctgcacaaccactacacgcagaagagcctctccctgtctccgggtaaatga

SEQ ID NO: 1232 - protein, 97 aa, Homo sapiens
ASTKGPSVFPLAPSSKSTSGGTAALGCLVKDYFPEPVTVSWNSGALTSGVHTFPAVLQSSGLYSLSSVVTVPSSSLGTQTYICNVNHKPSNTKVDKK

SEQ ID NO: 1233 - DNA, 290 bp, Homo sapiens
ctagcaccaagggcccatcggtcttccccctggcaccctcctccaagagcacctctgggggcacagcggccctgggctgcctggtcaaggactacttccccgaaccggtgacggtgtcgtggaactcaggcgccctgaccagcggcgtgcacaccttcccggctgtcctacagtcctcaggactctactccctcagcagcgtggtgaccgtgccctccagcagcttgggcacccagacctacatctgcaacgtgaatcacaagcccagcaacaccaaggtggacaagaaa

SEQ ID NO: 1234 - protein, 110 aa, Homo sapiens
APELLGGPSVFLFPPKPKDTLMISRTPEVTCVVVDVSHEDPEVKFNWYVDGVEVHNAKTKPREEQYNSTYRVVSVLTVLHQDWLNGKEYKCKVSNKALPAPIEKTISKAK

SEQ ID NO: 1235 - DNA, 330 bp, Homo sapiens
gcacctgaactcctggggggaccgtcagtcttcctcttccccccaaaacccaaggacaccctcatgatctcccggacccctgaggtcacatgcgtggtggtggacgtgagccacgaagaccctgaggtcaagttcaactggtacgtggacggcgtggaggtgcataatgccaagacaaagccgcgggaggagcagtacaacagcacgtaccgtgtggtcagcgtcctcaccgtcctgcaccaggactggctgaatggcaaggagtacaagtgcaaggtctccaacaaagccctcccagcccccatcgagaaaaccatctccaaagccaaa

SEQ ID NO: 1236 - protein, 110 aa, Artificial Sequence
  Synthetic Polypeptide
APEAAGGPSVFLFPPKPKDTLMISRTPEVTCVVVDVSHEDPEVKFNWYVDGVEVHNAKTKPREEQYNSTYRVVSVLTVLHQDWLNGKEYKCKVSNKALPAPIEKTISKAK

SEQ ID NO: 1237 - DNA, 330 bp, Artificial Sequence
  Synthetic Oligonucleotide
gcacctgaagccgccgggggaccgtcagtcttcctcttccccccaaaacccaaggacaccctcatgatctcccggacccctgaggtcacatgcgtggtggtggacgtgagccacgaagaccctgaggtcaagttcaactggtacgtggacggcgtggaggtgcataatgccaagacaaagccgcgggaggagcagtacaacagcacgtaccgtgtggtcagcgtcctcaccgtcctgcaccaggactggctgaatggcaaggagtacaagtgcaaggtctccaacaaagccctcccagcccccatcgagaaaaccatctccaaagccaaa

SEQ ID NO: 1238 - protein, 107 aa, Homo sapiens
GQPREPQVYTLPPSRDELTKNQVSLTCLVKGFYPSDIAVEWESNGQPENNYKTTPPVLDSDGSFFLYSKLTVDKSRWQQGNVFSCSVMHEALHNHYTQKSLSLSPGK

SEQ ID NO: 1239 - DNA, 324 bp, Homo sapiens
gggcagccccgagaaccacaggtgtacaccctgcccccatcccgggatgagctgaccaagaaccaggtcagcctgacctgcctggtcaaaggcttctatcccagcgacatcgccgtggagtgggagagcaatgggcagccggagaacaactacaagaccacgcctcccgtgctggactccgacggctccttcttcctctacagcaagctcaccgtggacaagagcaggtggcagcaggggaacgtcttctcatgctccgtgatgcatgaggctctgcacaaccactacacgcagaagagcctctccctgtctccgggtaaatga

SEQ ID NO: 1240 - protein, 16 aa, Homo sapiens
AEPKSCDKTHTCPPCP

SEQ ID NO: 1241 - DNA, 48 bp, Homo sapiens
gcagagcccaaatcttgtgacaaaactcacacatgcccaccgtgccca

SEQ ID NO: 1242 - protein, 453 aa, Homo sapiens
TRVLSQVQLVQSGAEVKKPGASVKVSCKASGYTFSGYSTHWLRQVPGQGLEWIGWDNPSSGDTTYAENFRGRVTLTRDTSITTDYLEVRGLRSDDTAVYYCARGGDDYSFDHWGQGTLVTVSSASTKGPSVFPLAPSSKSTSGGTAALGCLVKDYFPEPVTVSWNSGALTSGVHTFPAVLQSSGLYSLSSVVTVPSSSLGTQTYICNVNHKPSNTKVDKKAEPKSCDKTHTCPPCPAPELLGGPSVFLFPPKPKDTLMISRTPEVTCVVVDVSHEDPEVKFNWYVDGVEVHNAKTKPREEQYNSTYRVVSVLTVLHQDWLNGKEYKCKVSNKALPAPIEKTISKAKGQPREPQVYTLPPSRDELTKNQVSLTCLVKGFYPSDIAVEWESNGQPENNYKTTPPVLDSDGSFFLYSKLTVDKSRWQQGNVFSCSVMHEALHNHYTQKSLSLSPGK

SEQ ID NO: 1243 - protein, 453 aa, Artificial Sequence
  Synthetic Polypeptide
TRVLSQVQLVQSGAEVKKPGASVKVSCKASGYTFSGYSTHWLRQVPGQGLEWIGWDNPSSGDTTYAENFRGRVTLTRDTSITTDYLEVRGLRSDDTAVYYCARGGDDYSFDHWGQGTLVTVSSASTKGPSVFPLAPSSKSTSGGTAALGCLVKDYFPEPVTVSWNSGALTSGVHTFPAVLQSSGLYSLSSVVTVPSSSLGTQTYICNVNHKPSNTKVDKKAEPKSCDKTHTCPPCPAPEAAGGPSVFLFPPKPKDTLMISRTPEVTCVVVDVSHEDPEVKFNWYVDGVEVHNAKTKPREEQYNSTYRVVSVLTVLHQDWLNGKEYKCKVSNKALPAPIEKTISKAKGQPREPQVYTLPPSRDELTKNQVSLTCLVKGFYPSDIAVEWESNGQPENNYKTTPPVLDSDGSFFLYSKLTVDKSRWQQGNVFSCSVMHEALHNHYTQKSLSLSPGK

SEQ ID NO: 1244 - protein, 5 aa, Artificial Sequence
  Synthetic Polypeptide
GYSTH

SEQ ID NO: 1245 - protein, 17 aa, Artificial Sequence
  Artificial Polypeptide
WDNPSSGDTTYAENFRG

SEQ ID NO: 1246 - protein, 9 aa, Artificial Sequence
  Synthetic Polypeptide
GGDDYSFDH

SEQ ID NO: 1247 - protein, 11 aa, Artificial Sequence
  Synthetic Polypeptide
RGDSLRSYYAS

SEQ ID NO: 1248 - protein, 7 aa, Artificial Sequence
  Synthetic Polypeptide
GENNRPS

SEQ ID NO: 1249 - protein, 11 aa, Artificial Sequence
  Synthetic Polypeptide
NSRDSSDHLLL

SEQ ID NO: 1250 - protein, 121 aa, Homo sapiens; identical to SEQ ID NO: 845

SEQ ID NO: 1251 - protein, 113 aa, Homo sapiens; identical to SEQ ID NO: 846

SEQ ID NO: 1252 - protein, 119 aa, Homo sapiens; identical to SEQ ID NO: 847

SEQ ID NO: 1253 - protein, 119 aa, Homo sapiens; identical to SEQ ID NO: 848

SEQ ID NO: 1254 - protein, 119 aa, Homo sapiens; identical to SEQ ID NO: 848

SEQ ID NO: 1255 - protein, 119 aa, Homo sapiens; identical to SEQ ID NO: 850

SEQ ID NO: 1256 - protein, 119 aa, Homo sapiens; identical to SEQ ID NO: 851

SEQ ID NO: 1257 - protein, 118 aa, Homo sapiens; identical to SEQ ID NO: 852

SEQ ID NO: 1258 - protein, 119 aa, Homo sapiens; identical to SEQ ID NO: 853

SEQ ID NO: 1259 - protein, 119 aa, Homo sapiens; identical to SEQ ID NO: 848

SEQ ID NO: 1260 - protein, 119 aa, Homo sapiens; identical to SEQ ID NO: 855

SEQ ID NO: 1261 - protein, 116 aa, Homo sapiens; identical to SEQ ID NO: 856

SEQ ID NO: 1262 - protein, 119 aa, Homo sapiens; identical to SEQ ID NO: 857

SEQ ID NO: 1263 - protein, 122 aa, Homo sapiens; identical to SEQ ID NO: 858

SEQ ID NO: 1264 - protein, 118 aa, Homo sapiens; identical to SEQ ID NO: 859

SEQ ID NO: 1265 - protein, 118 aa, Homo sapiens; identical to SEQ ID NO: 859

SEQ ID NO: 1266 - protein, 116 aa, Homo sapiens; identical to SEQ ID NO: 861

SEQ ID NO: 1267 - protein, 118 aa, Homo sapiens; identical to SEQ ID NO: 862

SEQ ID NO: 1268 - protein, 122 aa, Homo sapiens; identical to SEQ ID NO: 863

SEQ ID NO: 1269 - protein, 119 aa, Homo sapiens; identical to SEQ ID NO: 864

SEQ ID NO: 1270 - protein, 119 aa, Homo sapiens; identical to SEQ ID NO: 851

SEQ ID NO: 1271 - protein, 121 aa, Homo sapiens; identical to SEQ ID NO: 866

SEQ ID NO: 1272 - protein, 118 aa, Homo sapiens; identical to SEQ ID NO: 867

SEQ ID NO: 1273 - protein, 112 aa, Homo sapiens; identical to SEQ ID NO: 868

SEQ ID NO: 1274 - protein, 111 aa, Homo sapiens; identical to SEQ ID NO: 869

SEQ ID NO: 1275 - protein, 112 aa, Homo sapiens; identical to SEQ ID NO: 870

SEQ ID NO: 1276 - protein, 112 aa, Homo sapiens; identical to SEQ ID NO: 871

SEQ ID NO: 1277 - protein, 112 aa, Homo sapiens; identical to SEQ ID NO: 872

SEQ ID NO: 1278 - protein, 111 aa, Homo sapiens; identical to SEQ ID NO: 873

SEQ ID NO: 1279 - protein, 111 aa, Homo sapiens; identical to SEQ ID NO: 874

SEQ ID NO: 1280 - protein, 111 aa, Homo sapiens; identical to SEQ ID NO: 875

SEQ ID NO: 1281 - protein, 112 aa, Homo sapiens; identical to SEQ ID NO: 876

SEQ ID NO: 1282 - protein, 112 aa, Homo sapiens; identical to SEQ ID NO: 877

SEQ ID NO: 1283 - protein, 111 aa, Homo sapiens; identical to SEQ ID NO: 878

SEQ ID NO: 1284 - protein, 111 aa, Homo sapiens; identical to SEQ ID NO: 879

SEQ ID NO: 1285 - protein, 112 aa, Homo sapiens; identical to SEQ ID NO: 880

SEQ ID NO: 1286 - protein, 112 aa, Homo sapiens; identical to SEQ ID NO: 881
  misc_feature (83)..(83): Xaa can be any naturally occurring amino acid

SEQ ID NO: 1287 - protein, 110 aa, Homo sapiens; identical to SEQ ID NO: 882

SEQ ID NO: 1288 - protein, 112 aa, Homo sapiens; identical to SEQ ID NO: 883

SEQ ID NO: 1289 - protein, 112 aa, Homo sapiens; identical to SEQ ID NO: 883

SEQ ID NO: 1290 - protein, 111 aa, Homo sapiens; identical to SEQ ID NO: 885

SEQ ID NO: 1291 - protein, 112 aa, Homo sapiens; identical to SEQ ID NO: 886

SEQ ID NO: 1292 - protein, 109 aa, Homo sapiens; identical to SEQ ID NO: 887

SEQ ID NO: 1293 - protein, 109 aa, Homo sapiens; identical to SEQ ID NO: 888

SEQ ID NO: 1294 - protein, 458 aa, Homo sapiens; identical to SEQ ID NO: 889

SEQ ID NO: 1295 - protein, 437 aa, Mus musculus; identical to SEQ ID NO: 890

SEQ ID NO: 1296 - DNA, 38 bp, Artificial sequence; identical to SEQ ID NO: 891
  Chemically synthesized primer

SEQ ID NO: 1297 - DNA, 32 bp, Artificial sequence; identical to SEQ ID NO: 892
  Chemically synthesized primer

SEQ ID NO: 1298 - DNA, 35 bp, Artificial sequence; identical to SEQ ID NO: 893
  Chemically synthesized primer

SEQ ID NO: 1299 - DNA, 31 bp, Artificial sequence; identical to SEQ ID NO: 894
  Chemically synthesized primer

SEQ ID NO: 1300 - DNA, 41 bp, Artificial sequence; identical to SEQ ID NO: 895
  Chemically synthesized primer

SEQ ID NO: 1301 - DNA, 32 bp, Artificial sequence; identical to SEQ ID NO: 896
  Chemically synthesized primer

SEQ ID NO: 1302 - DNA, 35 bp, Artificial sequence; identical to SEQ ID NO: 897
  Chemically synthesized primer

SEQ ID NO: 1303 - DNA, 26 bp, Artificial sequence
  Chemically synthesized primer
atagcacctaggacggtcagcttggt

SEQ ID NO: 1304 - protein, 5 aa, Artificial sequence
  Portion of CDR1 heavy chain sequence
SYAMS

SEQ ID NO: 1305 - protein, 5 aa, Artificial sequence
  Portion of CDR1 heavy chain sequence
  misc_feature (1)..(1): Xaa can be any naturally occurring amino acid
  misc_feature (5)..(5): Xaa can be any naturally occurring amino acid
XYAMX

SEQ ID NO: 1306 - protein, 5 aa, Artificial sequence
  Portion of CDR1 heavy chain sequence
  misc_feature (3)..(3): Xaa can be any naturally occurring amino acid
  misc_feature (5)..(5): Xaa can be any naturally occurring amino acid
SYXMX

SEQ ID NO: 1307 - protein, 17 aa, Artificial sequence
  Portion of CDR2 heavy chain sequence
  misc_feature (4)..(5): Xaa can be any naturally occurring amino acid
  misc_feature (8)..(8): Xaa can be any naturally occurring amino acid
  misc_feature (10)..(11): Xaa can be any naturally occurring amino acid
AISXXGGXTXXADSVKG

SEQ ID NO: 1308 - protein, 17 aa, Artificial sequence
  Portion of CDR2 heavy chain sequence
AISGSGGSTTTADSVKG

SEQ ID NO: 1309 - protein, 13 aa, Artificial sequence
  Portion of CDR3 heavy chain sequence
  misc_feature (9)..(9): Xaa can be any naturally occurring amino acid
NGNYRGSLXAFDI

SEQ ID NO: 1310 - protein, 14 aa, Artificial sequence
  Portion of CDR1 light chain sequence
TGSSSNIGAGYDVH

SEQ ID NO: 1311 - protein, 7 aa, Artificial sequence
  Portion of CDR2 light chain sequence
GNNNRPS

SEQ ID NO: 1312 - protein, 12 aa, Artificial sequence
  Portion of CDR3 light chain sequence
QSYDSSLSAWVV

SEQ ID NO: 1313 - protein, 6 aa, Artificial sequence
  Consensus sequence
EEDLPE

SEQ ID NO: 1314 - protein, 10 aa, Artificial Sequence
  Portion of the CDR3 heavy chain sequence
NGNYRGAFDI

SEQ ID NO: 1315 - DNA, 354 bp, Artificial Sequence
  Synthetic Polynucleotide
caggtgcagctggtgcagagcggcgcggaagtgaaaaaaccgggcgcgagcgtgaaagtgagctgcaaagcgagcggctatacctttgcgagcgcgtggatgcattggatgcgccaggcgccgggccagggcctggaatggattggctggattaacccgggcaacgtgaacaccaaatataacgaaaaatttaaaggccgcgcgaccctgaccgtggataccagcaccaacaccgcgtatatggaactgagcagcctgcgcagcgaagataccgcggtgtattattgcgcgcgcagcacctattatcgcccgctggattattggggccagggcaccctggtgaccgtgagcagc

SEQ ID NO: 1316 - protein, 118 aa, Artificial Sequence; identical to SEQ ID NO: 1199
  Synthetic Polypeptide

SEQ ID NO: 1317 - DNA, 336 bp, Artificial Sequence
  Synthetic Polynucleotide
gatattgtgatgacccagagcccggatagcctggcggtgagcctgggcgaacgcgcgaccattaactgcaaaagcagccagagcattctgtatagcagcaaccagaaaaactatctggcgtggtatcagcagaaaccgggccagagcccgaaactgctgatttattgggcgagcacccgcgaaagcggcgtgccggatcgctttagcggcagcggcagcggcaccgattttaccctgaccattagcagcctgcaggcggaagatgtggcggtgtattattgccatcagtatatgagcagctatacctttggccagggcaccaaactggaaattaaa

SEQ ID NO: 1318 - protein, 112 aa, Artificial Sequence; identical to SEQ ID NO: 1201
  Synthetic Polypeptide

SEQ ID NO: 1319 - DNA, 981 bp, Artificial Sequence
  Synthetic Polynucleotide
gcgagcaccaaaggcccgagcgtgtttccgctggcgccgtgcagccgcagcaccagcgaaagcaccgcggcgctgggctgcctggtgaaagattattttccggaaccggtgaccgtgagctggaacagcggcgcgctgaccagcggcgtgcatacctttccggcggtgctgcagagcagcggcctgtatagcctgagcagcgtggtgaccgtgccgagcagcagcctgggcaccaaaacctatacctgcaacgtggatcataaaccgagcaacaccaaagtggataaacgcgtggaaagcaaatatggcccgccgtgcccgagctgcccggcgccggaatttctgggcggcccgagcgtgtttctgtttccgccgaaaccgaaagataccctgatgattagccgcaccccggaagtgacctgcgtggtggtggatgtgagccaggaagatccggaagtgcagtttaactggtatgtggatggcgtggaagtgcataacgcgaaaaccaaaccgcgcgaagaacagtttaacagcacctatcgcgtggtgagcgtgctgaccgtgctgcatcaggattggctgaacggcaaagaatataaatgcaaagtgagcaacaaaggcctgccgagcagcattgaaaaaaccattagcaaagcgaaaggccagccgcgcgaaccgcaggtgtataccctgccgccgagcccggaagaaatgaccaaaaaccaggtgagcctgacctgcctggtgaaaggcttttatccgagcgatattgcggtggaatgggaaagcaacggccagccggaaaacaactataaaaccaccccgccggtgctggatagcgatggcagcttttttctgtatagccgcctgaccgtggataaaagccgctggcaggaaggcaacgtgtttagctgcagcgtgatgcatgaagcgctgcataaccattatacccagaaaagcctgagcctgagcctgggcaaa

SEQ ID NO: 1320 - protein, 327 aa, Artificial Sequence
  Synthetic Polypeptide
ASTKGPSVFPLAPCSRSTSESTAALGCLVKDYFPEPVTVSWNSGALTSGVHTFPAVLQSSGLYSLSSVVTVPSSSLGTKTYTCNVDHKPSNTKVDKRVESKYGPPCPSCPAPEFLGGPSVFLFPPKPKDTLMISRTPEVTCVVVDVSQEDPEVQFNWYVDGVEVHNAKTKPREEQFNSTYRVVSVLTVLHQDWLNGKEYKCKVSNKGLPSSIEKTISKAKGQPREPQVYTLPPSPEEMTKNQVSLTCLVKGFYPSDIAVEWESNGQPENNYKTTPPVLDSDGSFFLYSRLTVDKSRWQEGNVFSCSVMHEALHNHYTQKSLSLSLGK

SEQ ID NO: 1321 - DNA, 975 bp, Artificial Sequence
  Synthetic Polynucleotide
accaaaggcccgagcgtgtttccgctggcgccgtgcagccgcagcaccagcgaaagcaccgcggcgctgggctgcctggtgaaagattattttccggaaccggtgaccgtgagctggaacagcggcgcgctgaccagcggcgtgcatacctttccggcggtgctgcagagcagcggcctgtatagcctgagcagcgtggtgaccgtgccgagcagcagcctgggcaccaaaacctatacctgcaacgtggatcataaaccgagcaacaccaaagtggataaacgcgtggaaagcaaatatggcccgccgtgcccgccgtgcccggcgccggaatttctgggcggcccgagcgtgtttctgtttccgccgaaaccgaaagataccctgatgattagccgcaccccggaagtgacctgcgtggtggtggatgtgagccaggaagatccggaagtgcagtttaactggtatgtggatggcgtggaagtgcataacgcgaaaaccaaaccgcgcgaagaacagtttaacagcacctatcgcgtggtgagcgtgctgaccgtgctgcatcaggattggctgaacggcaaagaatataaatgcaaagtgagcaacaaaggcctgccgagcagcattgaaaaaaccattagcaaagcgaaaggccagccgcgcgaaccgcaggtgtataccctgccgccgagcccggaagaaatgaccaaaaaccaggtgagcctgacctgcctggtgaaaggcttttatccgagcgatattgcggtggaatgggaaagcaacggccagccggaaaacaactataaaaccaccccgccggtgctggatagcgatggcagcttttttctgtatagcaaactgaccgtggataaaagccgctggcaggaaggcaacgtgtttagctgcagcgtgatgcatgaagcgctgcataaccattatacccagaaaagcctgagcctgagcctgggcaaa

SEQ ID NO: 1322 - protein, 325 aa, Artificial Sequence
  Synthetic Polypeptide
TKGPSVFPLAPCSRSTSESTAALGCLVKDYFPEPVTVSWNSGALTSGVHTFPAVLQSSGLYSLSSVVTVPSSSLGTKTYTCNVDHKPSNTKVDKRVESKYGPPCPPCPAPEFLGGPSVFLFPPKPKDTLMISRTPEVTCVVVDVSQEDPEVQFNWYVDGVEVHNAKTKPREEQFNSTYRVVSVLTVLHQDWLNGKEYKCKVSNKGLPSSIEKTISKAKGQPREPQVYTLPPSPEEMTKNQVSLTCLVKGFYPSDIAVEWESNGQPENNYKTTPPVLDSDGSFFLYSKLTVDKSRWQEGNVFSCSVMHEALHNHYTQKSLSLSLGK

SEQ ID NO: 1323 - protein, 8 aa, Artificial Sequence
  Synthetic Oligopeptide
GYTFASAW

SEQ ID NO: 1324 - protein, 12 aa, Artificial Sequence
  Synthetic Oligopeptide
QSILYSSNQKNY

SEQ ID NO: 1325 - protein, 8 aa, Artificial Sequence
  Synthetic Oligopeptide
INPGNVNT

SEQ ID NO: 1326 - protein, 6 aa, Artificial Sequence
  Synthetic Oligopeptide
WASTRE

SEQ ID NO: 1327 - protein, 9 aa, Artificial Sequence
  Synthetic Oligopeptide
STYYRPLDY

SEQ ID NO: 1328 - protein, 8 aa, Artificial Sequence
  Synthetic Oligopeptide
HQYMSSYT

SEQ ID NO: 1329 - DNA, 354 bp, Artificial Sequence; identical to SEQ ID NO: 1182
  Synthetic Polynucleotide

SEQ ID NO: 1330 - protein, 118 aa, Artificial Sequence; identical to SEQ ID NO: 1183
  Synthetic Polypeptide

SEQ ID NO: 1331 - DNA, 336 bp, Artificial Sequence; identical to SEQ ID NO: 1184
  Synthetic Polynucleotide

SEQ ID NO: 1332 - protein, 112 aa, Artificial Sequence; identical to SEQ ID NO: 1185
  Synthetic Polypeptide

SEQ ID NO: 1333 - DNA, 354 bp, Artificial Sequence; identical to SEQ ID NO: 1186
  Synthetic Polynucleotide

SEQ ID NO: 1334 - protein, 118 aa, Artificial Sequence; identical to SEQ ID NO: 1187
  Synthetic Polypeptide

SEQ ID NO: 1335 - DNA, 336 bp, Artificial Sequence; identical to SEQ ID NO: 1188
  Synthetic Polynucleotide

SEQ ID NO: 1336 - protein, 112 aa, Artificial Sequence; identical to SEQ ID NO: 1189
  Synthetic Polypeptide

SEQ ID NO: 1337 - DNA, 354 bp, Artificial Sequence; identical to SEQ ID NO: 1190
  Synthetic Polynucleotide

SEQ ID NO: 1338 - protein, 118 aa, Artificial Sequence; identical to SEQ ID NO: 1191
  Synthetic Polypeptide

SEQ ID NO: 1339 - DNA, 336 bp, Artificial Sequence
  Synthetic Polynucleotide
gacatcgtgatgacccagagccccgacagcctggccgtgagcctgggcgagcgggccaccatcaactgcaagagcagccagagcatcctgtacagcagcaaccagaagaactacctggcctggtatcagcagaagcccggccagagccccaagctgctgatctactgggccagcacccgggagagcggcgtgcccgaccggtttagcggcagcggctccggcaccgacttcaccctgaccatcagcagcctgcaggccgaggacgtggccgtgtactactgccaccagtaccgtagcagctacaccttcggccagggcacaaagctggaaatcaag

SEQ ID NO: 1340 - protein, 112 aa, Artificial Sequence; identical to SEQ ID NO: 1193
  Synthetic Polypeptide

SEQ ID NO: 1341 - DNA, 354 bp, Artificial Sequence; identical to SEQ ID NO: 1194
  Synthetic Polynucleotide

SEQ ID NO: 1342 - protein, 118 aa, Artificial Sequence; identical to SEQ ID NO: 1195
  Synthetic Polypeptide

SEQ ID NO: 1343 - DNA, 336 bp, Artificial Sequence; identical to SEQ ID NO: 1196
  Synthetic Polynucleotide

SEQ ID NO: 1344 - protein, 112 aa, Artificial Sequence; identical to SEQ ID NO: 1197
  Synthetic Polypeptide

SEQ ID NO: 1345 - protein, 8 aa, Artificial Sequence
  Synthetic Oligopeptide
GYTFASYY

SEQ ID NO: 1346 - protein, 8 aa, Artificial Sequence
  Synthetic Oligopeptide
GYTFASYY

SEQ ID NO: 1347 - protein, 8 aa, Artificial Sequence
  Synthetic Oligopeptide
GYTFASSW

SEQ ID NO: 1348 - protein, 9 aa, Artificial Sequence
  Synthetic Oligopeptide
STWYRPLDY

SEQ ID NO: 1349 - protein, 9 aa, Artificial Sequence
  Synthetic Oligopeptide
STWYRPNDY

SEQ ID NO: 1350 - protein, 9 aa, Artificial Sequence
  Synthetic Oligopeptide
TTRYRPLDY

SEQ ID NO: 1351 - protein, 9 aa, Artificial Sequence
  Synthetic Oligopeptide
LTYYRPPDY

SEQ ID NO: 1352 - protein, 8 aa, Artificial Sequence
  Synthetic Oligopeptide
HQYLSSYT

SEQ ID NO: 1353 - protein, 8 aa, Artificial Sequence
  Synthetic Oligopeptide
HQYISSYT

SEQ ID NO: 1354 - protein, 8 aa, Artificial Sequence
  Synthetic Oligopeptide
HQYKSSYT

SEQ ID NO: 1355 - protein, 8 aa, Artificial Sequence
  Synthetic Oligopeptide
HQYRSSYT

SEQ ID NO: 1356 - protein, 8 aa, Artificial Sequence
  Synthetic Oligopeptide
HQYYSSYT

SEQ ID NO: 1357 - DNA, 354 bp, Artificial Sequence; identical to SEQ ID NO: 966
  Synthetic Polynucleotide

SEQ ID NO: 1358 - protein, 118 aa, Artificial Sequence; identical to SEQ ID NO: 967
  Synthetic Polypeptide

SEQ ID NO: 1359 - DNA, 336 bp, Artificial Sequence; identical to SEQ ID NO: 968
  Synthetic Polynucleotide

SEQ ID NO: 1360 - protein, 112 aa, Artificial Sequence; identical to SEQ ID NO: 969
  Synthetic Polypeptide

SEQ ID NO: 1361 - DNA, 360 bp, Artificial Sequence
  Synthetic Polynucleotide
gaggtgcagctggtggagtctggggctgaggtgaagaagcctggggcctcagtgaaggtctcctgcaagacttctggatacaccttcaccgaccactatatccactgggtgcgacaggcccctggacaagggcttgagtggatgggatggatcaaccctagcagtggtggcacagagtatgcacagaagtttcagggcagggtcaccatgaccagggacacgcccattagcacggcctacatggatctgagcgggctgagatctgacgacacggccgtttattactgtgcgagagagactatcggtggctggaacgctttggacgtctggggccaaggaaccctggtcaccgtctcctca

SEQ ID NO: 1362 - protein, 120 aa, Artificial Sequence
  Artificial Polypeptide
EVQLVESGAEVKKPGASVKVSCKTSGYTFTDHYIHWVRQAPGQGLEWMGWINPSSGGTEYAQKFQGRVTMTRDTPISTAYMDLSGLRSDDTAVYYCARETIGGWNALDVWGQGTLVTVSS

SEQ ID NO: 1363 - DNA, 333 bp, Artificial Sequence
  Artificial Polynucleotide
cagcctgtgctgactcagccaccctcagcgtctgggacccccgggcagagggtcaccatctcttgttctggaagcagctccaacatcggaattaatactgtaaactggtaccagcagctcccaagaacgccccccaaactcctcatctatactaataatcagcggccctcaggggtccctgaccgattctctggctccaagtctgacacctcagcctccctggccatcagtggcctccagtctgaggatgaggctgattattactgtgcagcttgggatgacaccctgaatggtccactattcggcggagggaccaaggtgaccgtcctaggt

SEQ ID NO: 1364 - protein, 111 aa, Artificial Sequence
  Synthetic Polypeptide
QPVLTQPPSASGTPGQRVTISCSGSSSNIGINTVNWYQQLPRTPPKLLIYTNNQRPSGVPDRFSGSKSDTSASLAISGLQSEDEADYYCAAWDDTLNGPLFGGGTKVTVLG

SEQ ID NO: 1365 - DNA, 357 bp, Artificial Sequence
  Synthetic Polynucleotide
gaggtgcagctggtgcagtctgggtctgagttgaagaagcctggggcctcagtgaaggtctcctgcaaggcttctggatacaccttcaccggctactatatgcactgggtgcgacaggcccctggacaagggcttgagtggatgggatggatcaaccctaacagtggtggcacaaactatgcacagaagtttcagggcagggtcaccgtgaccacagacacgtccacgagcacagcctacatggagctgaggagcctgagatctgacgacacggccgtctattactgtgcgagagagggtgttcactcggatgcttttgatgtgtggggccaagggaccacggtcaccgtctcctca

SEQ ID NO: 1366 - protein, 119 aa, Artificial Sequence
  Synthetic Polypeptide
EVQLVQSGSELKKPGASVKVSCKASGYTFTGYYMHWVRQAPGQGLEWMGWINPNSGGTNYAQKFQGRVTVTTDTSTSTAYMELRSLRSDDTAVYYCAREGVHSDAFDVWGQGTTVTVSS

SEQ ID NO: 1367 - DNA, 321 bp, Artificial Sequence
  Synthetic Polynucleotide
gaaacgacactcacgcagtctccagccaccctgtctgtgtctccaggggaaagggccaccctctcctgcagggccagtcagagtgtttacaccaacttagcctggtaccaacagaaacctggccaggctcccagtctcctcatctatggtgcatccagccgggccaccggcatcccagacagattcagtggcagcgggtctgggacagacttcactctcaccatcagcagactggagcctgaagattttgcagtgtattactgtcagcagtatggtagctcacatttcactttcggccctgggaccaaagtggatatcaaa

SEQ ID NO: 1368 - protein, 107 aa, Artificial Sequence
  Synthetic Polypeptide
ETTLTQSPATLSVSPGERATLSCRASQSVYTNLAWYQQKPGQAPSLLIYGASSRATGIPDRFSGSGSGTDFTLTISRLEPEDFAVYYCQQYGSSHFTFGPGTKVDIK

SEQ ID NO: 1369 - DNA, 360 bp, Artificial Sequence
  Synthetic Polynucleotide
gaggtgcagctggtgcagtctggggctgaggtgaagaagcctggggcctcagtgaaggtctcctgcaagacttctggatacaccttcaccgaccactatatccactgggtgcgacaggcccctggacaagggcttgagtggatgggatggatcaaccctagcagtggtggcacagagtatgcacagaagtttcagggcagggtcaccatgaccagggacacgcccattagcacggcctacatggatctgagcgggctgagatctgacgacacggccgtttattactgtgcgagagagactatcggtggctggaacgctttggacgtctggggccaagggaccacggtcaccgtctcctca

SEQ ID NO: 1370 - protein, 120 aa, Artificial Sequence
  Synthetic Polypeptide
EVQLVQSGAEVKKPGASVKVSCKTSGYTFTDHYIHWVRQAPGQGLEWMGWINPSSGGTEYAQKFQGRVTMTRDTPISTAYMDLSGLRSDDTAVYYCARETIGGWNALDVWGQGTTVTVSS

SEQ ID NO: 1371 - DNA, 333 bp, Artificial Sequence
  Synthetic Polynucleotide
cagtctgtgctgactcagccaccctcagcgtctgggtcccccgggcagagggtcaccatgtcttgctctggaagcagctccaccatcgggaggcattctgtaaactggtaccagcagctcccaggaacggcccccaaactcctcatctatgctaacaatcagcggccctcaggggtccctggccgattctctgcctccaagtctgacacctcagcctccctggccatcagtgggctccggtccgaggatgaggctaattattactgtgcagcgtgggatgacagtctcagtggcgtgctctttggcggtgggaccaaggtgaccgtcctaggt

SEQ ID NO: 1372 - protein, 111 aa, Artificial Sequence
  Synthetic Polypeptide
QSVLTQPPSASGSPGQRVTMSCSGSSSTIGRHSVNWYQQLPGTAPKLLIYANNQRPSGVPGRFSASKSDTSASLAISGLRSEDEANYYCAAWDDSLSGVLFGGGTKVTVLG

SEQ ID NO: 1373 - DNA, 360 bp, Artificial Sequence
  Synthetic Polynucleotide
gaggtgcagctggtggagtctggggctgaggtgaagaagcctggggcctcagtgaaggtctcctgcaagacttctggatacaccttcaccgaccactatatccactgggtgcgacaggcccctggacaagggcttgagtggatgggatggatcaaccctagcagtggtggcacagagtatgcacagaagtttcagggcagggtcaccatgaccagggacacgcccattagcacggcctacatggatctgagcgggctgagatctgacgacacggccgtttattactgtgcgagagagactatcggtggctggaacgctttggacgtctggggccaaggcaccctggtcaccgtctcctca

SEQ ID NO: 1374 - protein, 120 aa, Artificial Sequence; identical to SEQ ID NO: 1362
  Synthetic Polypeptide

SEQ ID NO: 1375 - DNA, 327 bp, Artificial Sequence
  Synthetic Polypeptide
ctgcctgtgctgactcagccaccctcagtgtcagtggccccaggacagacggccaggataacctgtgggggacacaagattggaactaaaagtgtgcactggtaccagcagaagccaggccaggcccctgtactggtcgtctatgatgatcgcgaccggccctcagggatccctgagcgattctctggctccaactctgggggcacggccaccctgaccatcagcagggtcgaagccggggatgaggccgactattactgtcaggtgtgggatagtaatagtgatcatgtggtgttcggcggagggaccaagctgaccgtcctaagt

SEQ ID NO: 1376 - protein, 109 aa, Artificial Sequence
  Synthetic Polypeptide
MPVLTQPPSVSVAPGQTARITCGGHKIGTKSVHWYQQKPGQAPVLVVYDDRDRPSGIPERFSGSNSGGTATLTISRVEAGDEADYYCQVWDSNSDHVVFGGGTKLTVLS

SEQ ID NO: 1377 - DNA, 360 bp, Artificial Sequence
  Synthetic Polynucleotide
gaggtgcagctggtgcagtctggggctgatgtgaagaagcctggggcctcagtgaaggtctcctgcaaggcttctggatacaccttcaccggctactatatacactgggtgcgacaggcccctggacaagggcttgagtggatgggatggatcaaccctaacagtggtggcacaaactatgcacagaagtttcagggcagggtcaccatgaccagggacacgtccatcagcacagcctacatggagctgagcaggctgagatctgacgacacggccgtctatttttgtgtgagagaggtgaaagattactattattacatggacgtctggggcagagggaccacggtcaccgtctcctca

SEQ ID NO: 1378 - protein, 120 aa, Artificial Sequence
  Synthetic Polypeptide
EVQLVQSGADVKKPGASVKVSCKASGYTFTGYYIHWVRQAPGQGLEWMGWINPNSGGTNYAQKFQGRVTMTRDTSISTAYMELSRLRSDDTAVYFCVREVKDYYYYMDVWGRGTTVTVSS

SEQ ID NO: 1379 - DNA, 336 bp, Artificial Sequence
  Synthetic Polynucleotide
aattttatgctgactcagccccactctgtgtcggaatctccggggaagacggttaccatctcgtgcacccgcagcagcggcagcattgccagcaactccgtgcagtggtacctgcagcgcccgggcagtgcccccaccactctgatctttgacaataaacaaagaccgtctggggtccctgatcgcttctctggctccatcgacagctcctccaactctgcctccctcagcatctctgggctgacgactgaggacgaggctgactatttctgtcagtcttatgatgacagtgagcaagtggtgttcggcggagggaccaagctgaccgtcctaagt

SEQ ID NO: 1380 - protein, 112 aa, Artificial Sequence
  Synthetic Polypeptide
NFMLTQPHSVSESPGKTVTISCTRSSGSIASNSVQWYLQRPGSAPTTLIFDNKQRPSGVPDRFSGSIDSSSNSASLSISGLTTEDEADYFCQSYDDSEQVVFGGGTKLTVLS

SEQ ID NO: 1381 - DNA, 363 bp, Artificial Sequence
  Synthetic Polynucleotide
gaggtgcagctggtggagtctggggctgaggtgaagaagcctggggcctcagtgaaggtctcctgcaaggcttctggatacaccttcaccggctactatatgcactgggtgcgacaggcccctggacaagggcttgagtggttggggtgggtcaaccctcacagtggtggcacaaactatgcacagaagtttcagggcagggtcaccatgaccagggacacgtccatcagcacagcctacatggagctgagcagactgagatctgacgacacggccgtatattactgtgcgagagagactgatatctctgctaattatcactttgactactggggccagggcaccctggtcaccgtctcctca

SEQ ID NO: 1382 - protein, 121 aa, Artificial Sequence
  Synthetic Polypeptide
EVQLVESGAEVKKPGASVKVSCKASGYTFTGYYMHWVRQAPGQGLEWLGWVNPHSGGTNYAQKFQGRVTMTRDTSISTAYMELSRLRSDDTAVYYCARETDISANYHFDYWGQGTLVTVSS

SEQ ID NO: 1383 - DNA, 336 bp, Artificial Sequence
  Synthetic Polynucleotide
cagtctgccctgactcagcctgcctccgtgtctgggtctcctggacagtcgatcaccatctcctgcactggaaccagcagtgatgttgggagttataacgctgtctcctggtaccaacaccacccaggcaaagcccccaaactcatgatttatgaggtcagtaagcggccctcaggggtttctaatcggttctctggctccaagtctggcaacacggcctccctgacaatctctgggctccgggctgaggacgaggctgattattattgtgcaacatgggatgacagcctgaaaggtccggtgttcggcggagggaccaagctgaccgtcctgggt

SEQ ID NO: 1384 - protein, 113 aa, Artificial Sequence
  Synthetic Polypeptide
QSALTQPASVSGSPGQSITISCTGTSSDVGSYNAVSWYQHHPGKAPKLMIYEVSKRPSGVSNRFSGSKSGNTASLTISGLRAEDEADYYCATWDDSLKGPVFGGGTKLTVLGE

SEQ ID NO: 1385 - DNA, 360 bp, Artificial Sequence
  Synthetic Polynucleotide
gaggtgcagctggtgcagtctggggctgaggtgaagaagcctggggcctcagtgaaggtctcctgcaaggcttctggatacaccttcaccggctactatatgcactgggtgcgacaggcccctggacaagggcttgaatggatgggatggatcaaccctaaaactggtgacacaaactatgcacagaagtttcagggcagggtcgccttgagcagggacacgtccttcaacacagcctacatggacctgagcagcctcagatctgacgacacggccgtctattactgtgcgagagagggcctgtcgaccagcagtccccttgactactggggccagggaaccctggtcaccgtctcctca

SEQ ID NO: 1386 - protein, 120 aa, Artificial Sequence
  Synthetic Polypeptide
EVQLVQSGAEVKKPGASVKVSCKASGYTFTGYYMHWVRQAPGQGLEWMGWINPKTGDTNYAQKFQGRVALSRDTSFNTAYMDLSSLRSDDTAVYYCAREGLSTSSPLDYWGQGTLVTVSS

SEQ ID NO: 1387 - DNA, 327 bp, Artificial Sequence
  Synthetic Polynucleotide
cagcctgggctgactcagccaccctcagtgtcagtggccccaggacagtcggccaagattacctgtggagaaaacgaacttgcaacaaatattgtacactggtaccagcagaagccaggccaggcccctgtgctggtcatctatcatgataacgaccggccctcagggatccctgagcgattctctggctccaacgctgggaacacggccaccctgaccatcagcagggtcgaagccggggatgaggccgacttttactgtcagctgtgggatagtgctagtgatcaagtggtcttcggcggagggaccacgttgaccgtcctaggt

SEQ ID NO: 1388 - protein, 109 aa, Artificial Sequence
  Synthetic Polypeptide
QPGLTQPPSVSVAPGQSAKITCGENELATNIVHWYQQKPGQAPVLVIYHDNDRPSGIPERFSGSNAGNTATLTISRVEAGDEADFYCQLWDSASDQVVFGGGTTLTVLG

SEQ ID NO: 1389 - DNA, 363 bp, Artificial Sequence
  Synthetic Polynucleotide
gaggtgcagctggtgcagtcaggggctgaggtgaagaggcctggggcctcattgaaggtttcctgcaaggcatctggatacaccttcaccagccactatatacactgggtgcgacaggcccccggacaagggcttgagtggatgggatggatcaacactggcaatggtgacacaagatattcacagaggttccagggcagagtcaccgttaccagggacacatccgcgagcacagtctacatggaactgagcagcctgagatctgaagacacggccgtgtattactgtgcgagagagtctagcagcagctggtttgttgcttttgatgtctggggccaagggaccacggtcaccgtctcctca

SEQ ID NO: 1390 - protein, 121 aa, Artificial Sequence
  Synthetic Polypeptide
EVQLVQSGAEVKRPGASLKVSCKASGYTFTSHYIHWVRQAPGQGLEWMGWINTGNGDTRYSQRFQGRVTVTRDTSASTVYMELSSLRSEDTAVYYCARESSSSWFVAFDVWGQGTTVTVSS

SEQ ID NO: 1391 - DNA, 327 bp, Artificial Sequence
  Synthetic Polynucleotide
cagcctgtgctgactcagccaccctcggtgtcattggccccaggacagacggccaggattacctgttcggaaaagaacattcgaagtaaaagagtgcactggtaccagcagaagccaggccaggcccctgtcctggtcatgtattctgataacggccggcgctcagggatccctgaccgattttctggctccaactctgggaacacggccaccctgaccatcaccagggtcgaagccggtgatgagggcgacttttactgtcaggtgtgggatccgattactgatcaggtggttttcggcggagggaccaagctgaccgtcctaggt

SEQ ID NO: 1392 - protein, 109 aa, Artificial Sequence
  Synthetic Polypeptide
QPVLTQPPSVSLAPGQTARITCSEKNIRSKRVHWYQQKPGQAPVLVMYSDNGRRSGIPDRFSGSNSGNTATLTITRVEAGDEGDFYCQVWDPITDQVVFGGGTKLTVLG

SEQ ID NO: 1393 - DNA, 372 bp, Artificial Sequence
  Synthetic Polynucleotide
caggtgcagctggtgcagtctggggctgaggtgaagcagcctgggtcctcagtgaaggtctcctgtaaggcttctggatacaccttcaccggctactatatgcactgggtgcgacaggcccctggagaagggcttgagtggctgggatggatcaaccctcacagtggtggcacaaactatgcacagaagttccagggcagagtcacgattaccgcggacaaatccacgagcacagcctacatggagctgagcagcctgagatctgaggacacggctgtgtattactgtgcgagggagattgtggtggtgactgctccggctgctgcggctatggacgtctggggccaaggcaccctggtcaccgtctcctca

SEQ ID NO: 1394 - protein, 124 aa, Artificial Sequence
  Synthetic Polypeptide
QVQLVQSGAEVKQPGSSVKVSCKASGYTFTGYYMHWVRQAPGEGLEWLGWINPHSGGTNYAQKFQGRVTITADKSTSTAYMELSSLRSEDTAVYYCAREIVVVTAPAAAAMDVWGQGTLVTVSS

SEQ ID NO: 1395 - DNA, 333 bp, Artificial Sequence
  Synthetic Polypeptide
cagtctgtgctgactcagccaccctccgcgtccgggtctcctggacagtcagtcaccatctcctgcactggaagcagcagtgacgttgctatttatgaccgtgtctcctggtaccagcagcccccaggcacagcccccaaactcattctttatgatgtccatgatcggccctcaggggtccctgatcgcttctctgggtccaagtctggcaacacggcctccctgaccatctctgggctccaggctgaggacgaggctgattattactgcagttcatacacaaccagcggcacttttgtcttcggaagtgggaccaaggtcaccgtcctaggt

SEQ ID NO: 1396 - protein, 111 aa, Artificial Sequence
  Synthetic Polypeptide
QSVLTQPPSASGSPGQSVTISCTGSSSDVAIYDRVSWYQQPPGTAPKLILYDVHDRPSGVPDRFSGSKSGNTASLTISGLQAEDEADYYCSSYTTSGTFVFGSGTKVTVLG

SEQ ID NO: 1397 - DNA, 366 bp, Artificial Sequence
  Synthetic Polynucleotide
gaggtgcagctggtgcagtctggggctgaggtgaagaagcctggggcctcagtgaacgtctcctgtaaggcttctggatacaccttcaccggctactatatgcactgggtgcgacaggcccctggacaagggcttgagtggatgggatggatcaaccccaacagtggtggcacaaactatgcacagaagtttcagggcagggtcaccgtgaccacagacacgtccaacagcacagcctacatggagctgaacaggctgaaatctgacgacacggccgtgtattattgtgcgagagaggggtccggggaccttgattccttatacatggacgtctggggcaaagggacaatggtcaccgtctcttca

SEQ ID NO: 1398 - DNA, 324 bp, Artificial Sequence
  Synthetic Polynucleotide
tcctatgagctgactcagccaccctcggtgtcagtggccccaggacagacggccaggattacctgtggggcaaacaacattggaagtaaaagtgtgcactggtaccagcagaagccaggccaggcccctgtgctggtcgtctatgatgatagcgaccggccctcagggatccctgagcgattctctggctccaactctgggaacacggccaccctgaccatcaccagggtcgaagccggggatgaggccgactattactgtcagctatgggatggtgggagtgatgtggttttcggcggagggaccaagctgaccgtcctaggt

SEQ ID NO: 1399 - protein, 122 aa, Artificial Sequence
  Synthetic Polypeptide
EVQLVQSGAEVKKPGASVNVSCKASGYTFTGYYMHWVRQAPGQGLEWMGWINPNSGGTNYAQKFQGRVTVTTDTSNSTAYMELNRLKSDDTAVYYCAREGSGDLDSLYMDVWGKGTMVTVSS

SEQ ID NO: 1400 - protein, 108 aa, Artificial Sequence
  Synthetic Polypeptide
SYELTQPPSVSVAPGQTARITCGANNIGSKSVHWYQQKPGQAPVLVVYDDSDRPSGIPERFSGSNSGNTATLTITRVEAGDEADYYCQLWDGGSDVVFGGGTKLTVLG

SEQ ID NO: 1401 - DNA, 360 bp, Artificial Sequence; identical to SEQ ID NO: 1361
  Synthetic Polynucleotide

SEQ ID NO: 1402 - protein, 120 aa, Artificial Sequence; identical to SEQ ID NO: 1362
  Synthetic Polypeptide

SEQ ID NO: 1403 - DNA, 333 bp, Artificial Sequence; identical to SEQ ID NO: 1363
  Synthetic Polynucleotide

SEQ ID NO: 1404 - protein, 111 aa, Artificial Sequence; identical to SEQ ID NO: 1364
  Synthetic Polypeptide

SEQ ID NO: 1405 - protein, 8 aa, Artificial Sequence
  Synthetic Oligopeptide
GYTFTDHY

SEQ ID NO: 1406 - protein, 8 aa, Artificial Sequence
  Synthetic Oligopeptide
INPSSGGT

SEQ ID NO: 1407 - protein, 13 aa, Artificial Sequence
  Synthetic Oligopeptide
ARETIGGWNALDV

SEQ ID NO: 1408 - protein, 8 aa, Artificial Sequence
  Synthetic Oligopeptide
SSNIGINT

SEQ ID NO: 1409 - protein, 3 aa, Artificial Sequence
  Synthetic Oligopeptide
TNN

SEQ ID NO: 1410 - protein, 11 aa, Artificial Sequence
  Synthetic Oligopeptide
AAWDDTLNGPL

SEQ ID NO: 1411 - protein, 8 aa, Artificial Sequence
  Synthetic Oligopeptide
GYTFTGYY

SEQ ID NO: 1412 - protein, 8 aa, Artificial Sequence
  Synthetic Oligopeptide
INPNSGGT

SEQ ID NO: 1413 - protein, 12 aa, Artificial Sequence
  Synthetic Oligopeptide
AREGVHSDAFDV

SEQ ID NO: 1414 - protein, 6 aa, Artificial Sequence
  Synthetic Oligopeptide
QSVYTN

SEQ ID NO: 1415 - protein, 3 aa, Artificial Sequence
  Synthetic Oligopeptide
GAS

SEQ ID NO: 1416 - protein, 9 aa, Artificial Sequence
  57
QQYGSSHFT

SEQ ID NO: 1417 - protein, 8 aa, Artificial Sequence
  Synthetic Oligopeptide
GYTFTDHY

SEQ ID NO: 1418 - protein, 8 aa, Artificial Sequence
  Synthetic Oligopeptide
INPSSGGT

SEQ ID NO: 1419 - protein, 13 aa, Artificial Sequence
  Synthetic Oligopeptide
ARETIGGWNALDV

SEQ ID NO: 1420 - protein, 8 aa, Artificial Sequence
  Synthetic Oligopeptide
SSTIGRHS

SEQ ID NO: 1421 - protein, 3 aa, Artificial Sequence
  Synthetic Oligopeptide
ANN

SEQ ID NO: 1422 - protein, 11 aa, Artificial Sequence
  Synthetic Oligopeptide
AAWDDSLSGVL

SEQ ID NO: 1423 - protein, 8 aa, Artificial Sequence
  Synthetic Oligopeptide
GYTFTDHY

SEQ ID NO: 1424 - protein, 7 aa, Artificial Sequence
  Synthetic Oligopeptide
INPSSGG

SEQ ID NO: 1425 - protein, 13 aa, Artificial Sequence
  Synthetic Oligopeptide
ARETIGGWNALDV

SEQ ID NO: 1426 - protein, 6 aa, Artificial Sequence
  Synthetic Oligopeptide
KIGTKS

SEQ ID NO: 1427 - protein, 3 aa, Artificial Sequence
  Synthetic Oligopeptide
DDR

SEQ ID NO: 1428 - protein, 11 aa, Artificial Sequence
  Synthetic Oligopeptide
QVWDSNSDHVV

SEQ ID NO: 1429 - protein, 8 aa, Artificial Sequence
  Synthetic Oligopeptide
GYTFTGYY

SEQ ID NO: 1430 - protein, 8 aa, Artificial Sequence
  Synthetic Oligopeptide
INPNSGGT

SEQ ID NO: 1431 - protein, 13 aa, Artificial Sequence
  Synthetic Oligopeptide
VREVKDYYYYMDV

SEQ ID NO: 1432 - protein, 8 aa, Artificial Sequence
  Synthetic Oligopeptide
SGSIASNS

SEQ ID NO: 1433 - protein, 3 aa, Artificial Sequence
  Synthetic Oligopeptide
DNK

SEQ ID NO: 1434 - protein, 10 aa, Artificial Sequence
  Synthetic Oligopeptide
QSYDDSEQVV

SEQ ID NO: 1435 - protein, 8 aa, Artificial Sequence
  Synthetic Oligopeptide
GYTFTGYY

SEQ ID NO: 1436 - protein, 8 aa, Artificial Sequence
  Synthetic Oligopeptide
VNPHSGGT

SEQ ID NO: 1437 - protein, 14 aa, Artificial Sequence
  Synthetic Oligopeptide
ARETDISANYHFDY

SEQ ID NO: 1438 - protein, 9 aa, Artificial Sequence
  Synthetic Oligopeptide
SSDVGSYNA

SEQ ID NO: 1439 - protein, 3 aa, Artificial Sequence
  Synthetic Oligopeptide
EVS

SEQ ID NO: 1440 - protein, 11 aa, Artificial Sequence
  Synthetic Oligopeptide
ATWDDSLKGPV

SEQ ID NO: 1441 - protein, 8 aa, Artificial Sequence
  Synthetic Oligopeptide
GYTFTGYY

SEQ ID NO: 1442 - protein, 8 aa, Artificial Sequence
  Synthetic Oligopeptide
INPKTGDT

SEQ ID NO: 1443 - protein, 13 aa, Artificial Sequence
  Synthetic Oligopeptide
AREGLSTSSPLDY

SEQ ID NO: 1444 - protein, 6 aa, Artificial Sequence
  Synthetic Oligopeptide
ELATNI

SEQ ID NO: 1445 - protein, 3 aa, Artificial Sequence
  Synthetic Oligopeptide
HDN

SEQ ID NO: 1446 - protein, 11 aa, Artificial Sequence
  Synthetic Oligopeptide
QLWDSASDQVV

SEQ ID NO: 1447 - protein, 8 aa, Artificial Sequence
  Synthetic Oligopeptide
GYTFTSHY

SEQ ID NO: 1448 - protein, 8 aa, Artificial Sequence
  Synthetic Oligopeptide
INTGNGDT

SEQ ID NO: 1449 - protein, 14 aa, Artificial Sequence
  Synthetic Oligopeptide
ARESSSSWFVAFDV

SEQ ID NO: 1450 - protein, 6 aa, Artificial Sequence
  Synthetic Oligopeptide
NIRSKR

SEQ ID NO: 1451 - protein, 3 aa, Artificial Sequence
  Synthetic Oligopeptide
SDN

SEQ ID NO: 1452 - protein, 11 aa, Artificial Sequence
  Synthetic Oligopeptide
QVWDPITDQVV

SEQ ID NO: 1453 - protein, 8 aa, Artificial Sequence
  Synthetic Oligopeptide
GYTFTGYY

SEQ ID NO: 1454 - protein, 8 aa, Artificial Sequence
  Synthetic Oligopeptide
INPHSGGT

SEQ ID NO: 1455 - protein, 17 aa, Artificial Sequence
  Synthetic Oligopeptide
AREIVVVTAPAAAAMDV

SEQ ID NO: 1456 - protein, 9 aa, Artificial Sequence
  Synthetic Oligopeptide
SSDVAIYDR

SEQ ID NO: 1457 - protein, 3 aa, Artificial Sequence
  Synthetic Oligopeptide
DVH

SEQ ID NO: 1458 - protein, 10 aa, Artificial Sequence
  Synthetic Oligopeptide
SSYTTSGTFV

SEQ ID NO: 1459 - protein, 8 aa, Artificial Sequence
  Synthetic Oligopeptide
GYTFTGYY

SEQ ID NO: 1460 - protein, 8 aa, Artificial Sequence
  Synthetic Oligopeptide
INPNSGGT

SEQ ID NO: 1461 - protein, 15 aa, Artificial Sequence
  Synthetic Oligopeptide
AREGSGDLDSLYMDV

SEQ ID NO: 1462 - protein, 6 aa, Artificial Sequence
  Synthetic Oligopeptide
NIGSKS

SEQ ID NO: 1463 - protein, 3 aa, Artificial Sequence
  Synthetic Oligopeptide
DDS

SEQ ID NO: 1464 - protein, 10 aa, Artificial Sequence
  Synthetic Oligopeptide
QLWDGGSDVV

SEQ ID NO: 1465 - protein, 8 aa, Artificial Sequence
  Synthetic Oligopeptide
GYTFTDHY

SEQ ID NO: 1466 - protein, 8 aa, Artificial Sequence
  Synthetic Oligopeptide
INPSSGGT

SEQ ID NO: 1467 - protein, 13 aa, Artificial Sequence
  Synthetic Oligopeptide
ARETIGGWNALDV

SEQ ID NO: 1468 - protein, 8 aa, Artificial Sequence
  Synthetic Oligopeptide
SSNIGINT

SEQ ID NO: 1469 - protein, 3 aa, Artificial Sequence
  Synthetic Oligopeptide
TNN

SEQ ID NO: 1470 - protein, 11 aa, Artificial Sequence
  Synthetic Oligopeptide
AAWDDTLNGPL

SEQ ID NO: 1471 - DNA, 390 bp, Artificial Sequence
  Synthetic Polynucleotide
caggtgcagctgttggagtctgggggaggcgtggtccagcctgggaggtccctgagactctcctgtgcagcctctggattcaccttcagtaactatggcatgcactgggtccgccaggctccaggcaaggggctggagtgggtggcaattatatcatttgatggaagtaaaaaatattatgcaaactccgtgaagggccgatccaccatctccagagacaattccaagaacacgctgtctctgcaaatgaacagcctgggacctgaggacacggctctatattactgtgcgaaactgccctccccgtattactttgatagtcggttcgtgtgggtcgccgccagcgcatttcacttctggggccagggaatcctggtcaccgtctcttca

SEQ ID NO: 1472 - protein, 130 aa, Artificial Sequence
  Synthetic Polypeptide
QVQLLESGGGVVQPGRSLRLSCAASGFTFSNYGMHWVRQAPGKGLEWVAIISFDGSKKYYANSVKGRSTISRDNSKNTLSLQMNSLGPEDTALYYCAKLPSPYYFDSRFVWVAASAFHFWGQGILVTVSS

SEQ ID NO: 1473 - protein, 110 aa, Artificial Sequence
  synthetic polypeptide
NFMLTQPPSASGTPGQRVTISCSGSSSNIGGNTVHWFQQLPGTAPKLLIYTNSLRPSGVPDRFSGSKSGTSASLAISGLQSEDEADYYCAAWDDSLNGQVFGGGTKLTVL

SEQ ID NO: 1474 - DNA, 330 bp, Artificial Sequence
  Synthetic Polynucleotide
aattttatgctgactcagccaccctcagcgtctgggacccccgggcagagggtcaccatctcttgctctggaagcagctccaacatcggaggtaatactgtacactggttccagcagctcccaggaacggcccccaaactcctcatctatactaatagtctgcggccctcaggggtccctgaccgattctctggctccaagtctggcacctcagcctccctggccatcagtgggctccagtctgaggatgaggctgattattactgtgcagcatgggataacagcctaaatggtcaggtgttcggcggagggaccaagctgaccgtccta

SEQ ID NO: 1475 - protein, 110 aa, Artificial Sequence
  Synthetic Polypeptide
NFMLTQPPSASGTPGQRVTISCSGSSSNIGGNTVHWFQQLPGTAPKLLIYTNSLRPSGVPDRFSGSKSGTSASLAISGLQSEDEADYYCAAWDNSLNGQVFGGGTKLTVL

SEQ ID NO: 1476 - protein, 8 aa, Artificial Sequence
  Synthetic oligopeptide
GFTFSNYG

SEQ ID NO: 1477 - protein, 8 aa, Artificial Sequence
  synthetic oligopeptide
ISFDGSKK

SEQ ID NO: 1478 - protein, 25 aa, Artificial Sequence
  Synthetic oligopeptide
CAKLPSPYYFDSRFVWVAASAFHFW

SEQ ID NO: 1479 - protein, 8 aa, Artificial Sequence
  synthetic oligopeptide
SSNIGGNT

SEQ ID NO: 1480 - protein, 3 aa, Artificial Sequence
  Synthetic oligopeptide
TNS

SEQ ID NO: 1481 - protein, 13 aa, Artificial Sequence [sequence omitted]

SEQ ID NO: 1482 - protein, 13 aa, Artificial Sequence
  1453
CAAWDNSLNGQVF

SEQ ID NO: 1483 - protein, 7 aa, Artificial Sequence
  Synthetic Oligopeptide
GNTNRPS

SEQ ID NO: 1484 - protein, 5 aa, Artificial Sequence
  Synthetic Oligonucleotide
GGGGS

SEQ ID NO: 1485 - DNA, 372 bp, Artificial Sequence
  Variable heavy chain of Ab-14
caggtgcagctggtgcagtctggagctgaggtgaagaagcctggggcctcagtgaaggtctcctgcaaggcttctggttacacctttaccagctatggtatcagctgggtgcgacaggcccctggacaagggcttgagtggatgggatggatcagcgcttacaatggtaacacaaactatgcacagaagctccagggcagagtcaccatgaccacagacacatccacgagcacagcctacatggagctgaggagcctgagatctgacgacacggccgtgtattactgtgcgagagctctacctagtgggactatactggtcggaggttggttcgacccctggggccagggaaccctggtcaccgtctcctca

SEQ ID NO: 1486 - protein, 124 aa, Artificial Sequence
  Variable heavy chain of Ab-14
QVQLVQSGAEVKKPGASVKVSCKASGYTFTSYGISWVRQAPGQGLEWMGWISAYNGNTNYAQKLQGRVTMTTDTSTSTAYMELRSLRSDDTAVYYCARALPSGTILVGGWFDPWGQGTLVTVSS

SEQ ID NO: 1487 - DNA, 333 bp, Artificial Sequence
  Variable light chain of Ab-14
aattttatgctgactcagccccactctgtgtcggagtctccggggaagacggtaaccatctcctgcacccgcagcagtggcaacattgccagcaattatgtgcagtggtaccaacagcgcccgggcagtgcccccaccactgtgatctatgaggataaccaaagaccctctggggtccctgatcggttctctggctccatcgacagctcctccaactctgcctccctcaccatctctggactgaagactgaggacgaggctgactactactgtcagtcttatgatagcagcaatctttgggtgttcggcggagggaccaagctgaccgtccta

SEQ ID NO: 1488 - protein, 111 aa, Artificial Sequence
  Variable light chain of Ab-14
NFMLTQPHSVSESPGKTVTISCTRSSGNIASNYVQWYQQRPGSAPTTVIYEDNQRPSGVPDRFSGSIDSSSNSASLTISGLKTEDEADYYCQSYDSSNLWVFGGGTKLTVL

SEQ ID NO: 1489 - DNA, 372 bp, Artificial Sequence
  Variable heavy chain of Ab-16
gaggtgcagctggtgcagtctgggggaggcgtggtccagcctgggaggtccctgagactctcctgtgcagcctctggattcacctttagcagctatgccctgagctgggtccgccaggctccagggaaggggctggagtgggtctcagctattagtggtggtggtggtagcacatactacgcagactccgtgaagggccggttcaccatctccagagacaattccaagaacacgctgtatctgcaaatgaacagcctgagagccgaggacacggccgtatattactgtgcgaaagacgtgtttccagagactttttcgatgaactacggtatggacgtctggggccaaggaaccctggtcaccgtctcctca

SEQ ID NO: 1490 - protein, 124 aa, Artificial Sequence
  Variable heavy chain Ab-16
EVQLVQSGGGVVQPGRSLRLSCAASGFTFSSYALSWVRQAPGKGLEWVSAISGGGGSTYYADSVKGRFTISRDNSKNTLYLQMNSLRAEDTAVYYCAKDVFPETFSMNYGMDVWGQGTLVTVSS

SEQ ID NO: 1491 - DNA, 324 bp, Artificial Sequence
  Variable light chain of Ab-16
tcttctgagctgactcaggaccctgctgtgtctgtggccttgggacagacagtcaggatcacatgccaaggagacagcctcagaagctattatgcaagctggtaccagcagaagccaggacaggcccctgtacttgtcatctatggtaaaaacaaccggccctcagggatcccagaccgattctctggctccagctcaggaaacacagcttccttgaccatcactggggctcaggcggaagatgaggctgactattactgtaactcccgggacagcagtggtaaccattatgtcttcggaactgggaccaaggtcaccgtccta

SEQ ID NO: 1492 - protein, 108 aa, Artificial Sequence
  Variable light chain of Ab-16
SSELTQDPAVSVALGQTVRITCQGDSLRSYYASWYQQKPGQAPVLVIYGKNNRPSGIPDRFSGSSSGNTASLTITGAQAEDEADYYCNSRDSSGNHYVFGTGTKVTVL

SEQ ID NO: 1493 - DNA, 384 bp, Artificial Sequence
  Variable heavy chain of Ab-22
caggtgcagctggtgcagtctgggggaggcgtggtacagcctggggggtccctgagactctcctgtgcagcctctggattcacctttgatgattatgccatgcactgggtccgtcaagctccagggaagggtctggagtgggtctctcttattagtggggatggtggtagcacatactatgcagactctgtgaagggccgattcaccatctccagagacaacagcaaaaactccctgtatctgcaaatgaacagtctgagaactgaggacaccgccttgtattactgtgcaaaagtgctcctcccctgtagtagtaccagctgctatggaagcgtcggtgcttttgatatctggggccaagggaccacggtcaccgtctcctca

SEQ ID NO: 1494 - protein, 128 aa, Artificial Sequence
  Variable heavy chain of Ab-22
QVQLVQSGGGVVQPGGSLRLSCAASGFTFDDYAMHWVRQAPGKGLEWVSLISGDGGSTYYADSVKGRFTISRDNSKNSLYLQMNSLRTEDTALYYCAKVLLPCSSTSCYGSVGAFDIWGQGTTVTVSS

SEQ ID NO: 1495 - DNA, 324 bp, Artificial Sequence
  Variable light chain Ab-22
taggacgatgagctcggtcccagctccgaagacataatgatcactattattatcccacacctgacagtaataatcggcctcatcaccggcttcgaccctgctgatggtcagggtggccgtgttcccagagttggagccagagaatcgctcagagatccctgagggccggtccctatcagagtagatgaccaacgcaggggcctggcctggcttctgctggtaccagtgcacactcttccttccaatgtcgcttcccccacaggtaatcctggccgtctttcctggggccactgacactgagggtgcctgagtcagcacaggcag

SEQ ID NO: 1496 - protein, 108 aa, Artificial Sequence
  Variable light chain of Ab-22
LPVLTQAPSVSVAPGKTARITCGGSDIGRKSVHWYQQKPGQAPALVIYSDRDRPSGISERFSGSNSGNTATLTISRVEAGDEADYYCQVWDNNSDHYVFGAGTELIVL

SEQ ID NO: 1497 - DNA, 351 bp, Artificial Sequence
  Variable heavy chain of Ab-30
caggtgcagctggtgcagtctgggggaagtgtggtacggcctggggaatccctcagactctcctgtgtagcctctggattcatctttgataattatgacatgagttgggtccgccaagttccagggaaggggctggagtgggtctctcgtgttaattggaatggtggtagcacaacttatgcagacgctgtgaagggccgattcaccatctccagagacaacaccaagaactccctgtatctacaaatgaacaacctgagagccgaagacacggccgtgtattactgtgtgcgcgagtttgtcggtgcttatgatctctggggccaggggaccacggtcaccgtctcctca

SEQ ID NO: 1498 - protein, 117 aa, Artificial Sequence
  Variable heavy chain of Ab-30
QVQLVQSGGSVVRPGESLRLSCVASGFIFDNYDMSWVRQVPGKGLEWVSRVNWNGGSTTYADAVKGRFTISRDNTKNSLYLQMNNLRAEDTAVYYCVREFVGAYDLWGQGTTVTVSS

SEQ ID NO: 1499 - DNA, 327 bp, Artificial Sequence
  Variable light chain of Ab-30
cagtctgccctgactcagcctgcctccgtgtctgggtctcctggacagtcgatcaccatctcctgcactggaaccagcagtgacgttggtggttataactatgtctcctggtaccaacaacacccaggcaaagcccccaaactcatgatttatgatgtcagtaatcggccctcaggggtttctaatcgcttctctggctccaagtctggcaacacggcctccctgaccatctctgggctccaggctgaggacgaggctgattattactgcagctcatatacaagcagcactctgccgttcggcggagggaccaagctgaccgtccta

SEQ ID NO: 1500 - protein, 109 aa, Artificial Sequence
  Variable light chain of Ab-30
QSALTQPASVSGSPGQSITISCTGTSSDVGGYNYVSWYQQHPGKAPKLMIYDVSNRPSGVSNRFSGSKSGNTASLTISGLQAEDEADYYCSSYTSSTLPFGGGTKLTVL

SEQ ID NO: 1501 - DNA, 363 bp, Artificial Sequence
  Variable heavy chain of Ab-31
caggtgcagctggtgcagtctggggctgaggtgaagaagccaggggccacagtgaaggtctcctgcaaggtttttggagacaccttccgcggcctctatatacactgggtgcgacaggcccctggacaagggcttgagtggatgggagggatcatccctatctttggtacagcaaactacgcacagaagttccagggcagagtcacgattaccacggacgaatccacgagcacagcctacatggagctgagcagcctgagatctgaggacacggccgtgtattactgtgcgagcggactacgttgggggatctggggctggttcgacccctggggccagggcaccctggtcaccgtctcctca

SEQ ID NO: 1502 - protein, 121 aa, Artificial Sequence
  Variable heavy chain of Ab-31
QVQLVQSGAEVKKPGATVKVSCKVFGDTFRGLYIHWVRQAPGQGLEWMGGIIPIFGTANYAQKFQGRVTITTDESTSTAYMELSSLRSEDTAVYYCASGLRWGIWGWFDPWGQGTLVTVSS

SEQ ID NO: 1503 - DNA, 321 bp, Artificial Sequence
  Variable light chain of Ab-31
gaaattgtgttgacgcagtctccagccaccctgtctttgtctccaggggaaagagccaccctctcctgcagggccagtcagagtattggcaacagcttagcctggtaccagcagaaacctggccaggctcccaggctcctcatgtatggtgcatccagcagggccactggcatcccagacaggttcagtggcagtggggctgggacagacttcactctcaccatcagcagcctagagcctgaagattttgcaacgtattactgtcagcagcatactatcccaacattctctttcggccctgggaccaaagtggaagtcaaa

SEQ ID NO: 1504 - protein, 107 aa, Artificial Sequence
  Variable light chain of Ab-31
EIVLTQSPATLSLSPGERATLSCRASQSIGNSLAWYQQKPGQAPRLLMYGASSRATGIPDRFSGSGAGTDFTLTISSLEPEDFATYYCQQHTIPTFSFGPGTKVEVK

SEQ ID NO: 1505 - DNA, 363 bp, Artificial Sequence
  Variable heavy chain of Ab-32
gaggtgcagctggtgcagtctggggctgagctgaagaagcctgggtcctcggtgaaggtctcctgcaaggcttttggaggcaccttcagtgacaatgctatcagctgggtgcgacaggcccctggacaagggcctgagtggatggggggcatcattcctatctttggaaaaccaaactacgcacagaagttccagggcagagtcacgattaccgcggacgaatccacgagcactgcctacatggtcctgagcagcctgagatctgaggacacggccgtatattactgtgcgagaactatggttcggggctttcttggggttatggacgtctggggccaagggaccacggtcaccgtctcctca

SEQ ID NO: 1506 - protein, 121 aa, Artificial Sequence
  Variable heavy chain of Ab-32
EVQLVQSGAELKKPGSSVKVSCKAFGGTFSDNAISWVRQAPGQGPEWMGGIIPIFGKPNYAQKFQGRVTITADESTSTAYMVLSSLRSEDTAVYYCARTMVRGFLGVMDVWGQGTTVTVSS

SEQ ID NO: 1507 - DNA, 321 bp, Artificial Sequence
  Variable light chain of Ab-32
gatattgtgatgacccagactccatccttcctgtccgcatccataggagacagagtcaccatcacttgccgggccagtcagggcattggcagttatttagcctggtatcagcaaagaccaggggaagcccctaagctcctgatctatgctgcatcgactttgcaaagtggagtcccatcaaggttcagcggcagtggatctgggacggacttcactctcacaatcagcaacctgcagcctgaagattttgcaacttattactgtcaacagcttaataattacccgatcaccttcggccaagggacacgactggagattaaa

SEQ ID NO: 1508 - protein, 107 aa, Artificial Sequence
  Variable light chain of Ab-32
DIVMTQTPSFLSASIGDRVTITCRASQGIGSYLAWYQQRPGEAPKLLIYAASTLQSGVPSRFSGSGSGTDFTLTISNLQPEDFATYYCQQLNNYPITFGQGTRLEIK

SEQ ID NO: 1509 - DNA, 375 bp, Artificial Sequence
  Variable heavy chain of Ab-38
caggtgcagctggtgcagtctgggggaggcttggtacagcctggggggtccctgagactctcctgtgcagcctctggattcacctttagcagctatgccatgagctgggtccgccaggctccagggaaggggctggagtgggtctcagctattagtggtagtggtggtagcacatactacgcagactccgtgaagggccggttcaccatctccagagacaattccaagaacacgctgtatctgcaaatgaacagcctgagagccgaggacacggccgtatattactgtgcgaaagatcagttcgttacgatttttggagtgccaagatacggtatggacgtctggggccaagggaccacggtcaccgtctcctca

SEQ ID NO: 1510 - protein, 125 aa, Artificial Sequence
  Variable heavy chain of Ab-38
QVQLVQSGGGLVQPGGSLRLSCAASGFTFSSYAMSWVRQAPGKGLEWVSAISGSGGSTYYADSVKGRFTISRDNSKNTLYLQMNSLRAEDTAVYYCAKDQFVTIFGVPRYGMDVWGQGTTVTVSS

SEQ ID NO: 1511 - DNA, 315 bp, Artificial Sequence
  Variable light chain of Ab-38
cagtctgccctgactcagccaccctcagtgtccgtgtccccaggacagacagccaacatcccctgctctggagataaattggggaataaatatgcttactggtatcagcagaagccaggccagtcccctgtactgctcatctatcaagatatcaagcggccctcaaggatccctgagcgattctctggctccaactctgcggacacagccactctgaccatcagcgggacccaggctatggatgaggctgactattactgtcagacgtgggacaacagcgtggtcttcggcggcgggaccaagctgaccgtcctc

SEQ ID NO: 1512 - protein, 105 aa, Artificial Sequence
  Variable light chain of Ab-38
QSALTQPPSVSVSPGQTANIPCSGDKLGNKYAYWYQQKPGQSPVLLIYQDIKRPSRIPERFSGSNSADTATLTISGTQAMDEADYYCQTWDNSVVFGGGTKLTVL

SEQ ID NO: 1513 - DNA, 360 bp, Artificial Sequence
  Variable heavy chain of Ab-42
caggtgcagctggtgcagtctggggctgaggtgaagaagcctgggtcctcggtgaaggtctcctgcaaggcttctggaggcaccttcagcagctatgctatcagctgggtgcgacaggcccctggacaagggcttgagtggatgggagggatcatccctatctttggtacagcaaactacgcacagaagttccagggcagagtcacgattaccgcggacaaatccacgagcacagcctacatggagctgagcagcctgagatctgaggacacggccgtctattactgtgcgagagggcgtcaaatgttcggtgcgggaattgatttctggggcccgggcaccctggtcaccgtctcctca

SEQ ID NO: 1514 - protein, 120 aa, Artificial Sequence
  Variable heavy chain of Ab-42
QVQLVQSGAEVKKPGSSVKVSCKASGGTFSSYAISWVRQAPGQGLEWMGGIIPIFGTANYAQKFQGRVTITADKSTSTAYMELSSLRSEDTAVYYCARGRQMFGAGIDFWGPGTLVTVSS

SEQ ID NO: 1515 - DNA, 336 bp, Artificial Sequence
  Variable light chain of Ab-42
aattttatgctgactcagccccactctgtgtcggagtctccggggaagacggtaaccatctcctgcacccgcagcagtggcagcattgacagcaactatgtgcagtggtaccagcagcgcccgggcagcgcccccaccactgtgatctatgaggataaccaaagaccctctggggtccctgatcggttctctggctccatcgacagctcctccaactctgcctccctcaccatctctggactgaagactgaggacgaggctgactactactgtcagtcttatgatagcaacaatcgtcatgtgatattcggcggagggaccaagctgaccgtccta

SEQ ID NO: 1516 - protein, 112 aa, Artificial Sequence
  Variable light chain of Ab-42
NFMLTQPHSVSESPGKTVTISCTRSSGSIDSNYVQWYQQRPGSAPTTVIYEDNQRPSGVPDRFSGSIDSSSNSASLTISGLKTEDEADYYCQSYDSNNRHVIFGGGTKLTVL

SEQ ID NO: 1517 - DNA, 354 bp, Artificial Sequence
  Variable heavy chain of Ab-46
gaggtgcagctggtggagtctggggctgaagtaaagaagcctgggtcctcggtgaaagtctcctgcaaggtttcaggaggcacattcggcacctatgctctcaactgggtgcgccaggcccctggacaagggcttgagtggatgggaaggatcgtccctctcattggtctagtaaactacgcacataactttgagggcagaatctcgattaccgcggacaagtccacgggcacagcctacatggaactgagcaacctgagatctgacgacacggccgtgtattactgtgcgagagaggtctacggtggtaactccgactactggggccagggaaccctggtcaccgtctcctca

SEQ ID NO: 1518 - protein, 118 aa, Artificial Sequence
  Variable heavy chain of Ab-46
EVQLVESGAEVKKPGSSVKVSCKVSGGTFGTYALNWVRQAPGQGLEWMGRIVPLIGLVNYAHNFEGRISITADKSTGTAYMELSNLRSDDTAVYYCAREVYGGNSDYWGQGTLVTVSS

SEQ ID NO: 1519 - DNA, 330 bp, Artificial Sequence
  Variable light chain of Ab-46
aattttatgctgactcagccccactcagtgtcggagtctccggggaagacggtaaccatctcctgcactcgcagtagtggcaacattggcaccaactatgtgcagtggtaccagcagcgcccgggcagtgcccccgtcgctttgatctacgaggattatcgaagaccctctggggtccctgatcggttctctggctccatcgacagctcctccaactctgcctccctcatcatctctggactgaagcctgaggacgaggctgactactactgtcagtcttatcatagcagcggttgggaattcggcggagggaccaagctgaccgtcctc

SEQ ID NO: 1520 - protein, 110 aa, Artificial Sequence
  Variable light chain of Ab-46
NFMLTQPHSVSESPGKTVTISCTRSSGNIGTNYVQWYQQRPGSAPVALIYEDYRRPSGVPDRFSGSIDSSSNSASLIISGLKPEDEADYYCQSYHSSGWEFGGGTKLTVL

SEQ ID NO: 1521 - DNA, 360 bp, Artificial Sequence
  Variable heavy chain of Ab-50
caggtgcagctggtgcagtctggaggtgaggtgaagaagccgggggcctcagtgaaggtctcctgcaaggcttctggttacaccttgagcagtcatggtataacctgggtgcgacaggcccctggacaagggcttgagtggatgggatggatcagcgctcacaatggtcacgctagcaatgcacagaaggtggaggacagagtcactatgactactgacacatccacgaacacagcctacatggaactgaggagcctgacagctgacgacacggccgtgtattactgtgcgagagtacatgctgccctctactatggtatggacgtctggggccaaggaaccctggtcaccgtctcctca

SEQ ID NO: 1522 - protein, 120 aa, Artificial Sequence
  Variable heavy chain of Ab-50
QVQLVQSGGEVKKPGASVKVSCKASGYTLSSHGITWVRQAPGQGLEWMGWISAHNGHASNAQKVEDRVTMTTDTSTNTAYMELRSLTADDTAVYYCARVHAALYYGMDVWGQGTLVTVSS

SEQ ID NO: 1523 - DNA, 324 bp, Artificial Sequence
  Variable light chain of Ab-50
cagtctgtgctgactcagccaccctcggtgtcagtggccccaggacagacggccaggattacctgtgggggaaacaacattggaagtaaaggtgtgcactggtatcagcagaagccaggccaggcccctgtactggtcgtctatgatgatagtgaccggccctcagggatccctgagcgattctctggctccaactctgggaacacggccaccctgaccatcagcagggtcgaagccggggatgaggccgactattactgtcaggtgtgggatagtagtagtgatcattgggtgttcggcggagggaccaagctgaccgtccta

SEQ ID NO: 1524 - protein, 108 aa, Artificial Sequence
  Variable light chain of Ab-50
QSVLTQPPSVSVAPGQTARITCGGNNIGSKGVHWYQQKPGQAPVLVVYDDSDRPSGIPERFSGSNSGNTATLTISRVEAGDEADYYCQVWDSSSDHWVFGGGTKLTVL

SEQ ID NO: 1525 - DNA, 363 bp, Artificial Sequence
  Variable heavy chain of Ab-52
caggtgcagctgcaggagtcggggggaggcgtggtgcagcctgggaggtccctgagactctcctgttcagcctctggattcaccttcagcagacatggcatgcactgggtccgccaggctccaggcaaggggctggagtgggtggcagtgatatcacatgatggaagtgtaaaatactatgcagactccatgaagggccgattcagcatctccagagacaattccaacaacacactgtatctccaaatggacagcctgagagctgacgacacggccgtttattactgtgcgagaggactgtcgtaccaggtgtcggggtggttcgacccctggggccagggcaccctggtcaccgtctcctca

SEQ ID NO: 1526 - protein, 121 aa, Artificial Sequence
  Variable heavy chain of Ab-52
QVQLQESGGGVVQPGRSLRLSCSASGFTFSRHGMHWVRQAPGKGLEWVAVISHDGSVKYYADSMKGRFSISRDNSNNTLYLQMDSLRADDTAVYYCARGLSYQVSGWFDPWGQGTLVTVSS

SEQ ID NO: 1527 - DNA, 333 bp, Artificial Sequence
  Variable light chain of Ab-52
aattttatgctgactcagccccactctgtgtcggagtctccggggaagacggtaaccatctcctgcacccgcagcagtggcagcattgccagcaactatgtgcagtggtaccagcagcgcccgggcagtgcccccaccactgtgatctatgaggataaccaaagaccctctggggtccctgatcggttctctggctccatcgacagctcctccaactctgcctccctcaccatctctggactgaagactgaggacgaggctgactactactgtcagtcttatgatagcaccaccccttcggtgttcggcggcgggaccaagctgaccgtccta

SEQ ID NO: 1528 - protein, 111 aa, Artificial Sequence
  Variable light chain of Ab-52
NFMLTQPHSVSESPGKTVTISCTRSSGSIASNYVQWYQQRPGSAPTTVIYEDNQRPSGVPDRFSGSIDSSSNSASLTISGLKTEDEADYYCQSYDSTTPSVFGGGTKLTVL

SEQ ID NO: 1529 - DNA, 360 bp, Artificial Sequence
  Variable heavy chain of Ab-55
caggtgcagctggtgcagtctggagctgaggtgaagaagcctggggcctcagtgaaggtctcctgcaaggcttctggttacacctttaccagctatggtatcagctgggtgcgacaggcccctggacaagggcttgagtggatgggatggaccagccctcataatggtctcacagcatttgcacagatcctagagggccgagtcaccatgaccacagacacatccacgaacacagcctacatggaattgaggaacctgacatttgatgacacggccgtttatttctgtgcgaaagtacatcctgtcttctcttatgcgttggacgtctggggccaaggcaccctggtcaccgtctcctca

SEQ ID NO: 1530 - protein, 120 aa, Artificial Sequence
  Variable heavy chain of Ab-55
QVQLVQSGAEVKKPGASVKVSCKASGYTFTSYGISWVRQAPGQGLEWMGWTSPHNGLTAFAQILEGRVTMTTDTSTNTAYMELRNLTFDDTAVYFCAKVHPVFSYALDVWGQGTLVTVSS

SEQ ID NO: 1531 - DNA, 330 bp, Artificial Sequence
  Variable light chain of Ab-55
aattttatgctgactcagccccactctgtgtcggagtccccggggaagacggtaaccatctcctgcacccgcagcagtggcagcattgccagcaactatgtacagtggtaccagcagcgcccgggcagttcccccaccactgtgatctatgaagataaccaaagaccctctggggtccctgatcggttctctggctccatcgacacctcctccaactctgcctccctcaccatctctggactgaagactaaggacgaggcggactactactgtcagtcttatgatggcatcactgtgattttcggcggagggaccaagttgaccgtccta

SEQ ID NO: 1532 - protein, 110 aa, Artificial Sequence
  Variable light chain of Ab-55
NFMLTQPHSVSESPGKTVTISCTRSSGSIASNYVQWYQQRPGSSPTTVIYEDNQRPSGVPDRFSGSIDTSSNSASLTISGLKTKDEADYYCQSYDGITVIFGGGTKLTVL

SEQ ID NO: 1533 - DNA, 354 bp, Artificial Sequence
  Variable heavy chain of Ab-56
gaggtgcagctggtggagtctggagctgaggtgatgaaccctgggtcctcggtgagggtctcctgcaggggttctggaggcgacttcagtacctatgctttcagctgggtgcgacaggcccctggacaagggcttgagtggatgggaaggatcatccctatccttggtatagcaaactacgcacagaagttccagggcagggtcacgattaccgcggacaaatccacgagcacagcctacatggagctgagcagcctgagatctgacgatacggccgtgtattactgtgcgagagatggctatggttcggacccggtgctatggggccagggcaccctggtcaccgtctcctca

SEQ ID NO: 1534 - protein, 118 aa, Artificial Sequence
  Variable heavy chain of Ab-56
EVQLVESGAEVMNPGSSVRVSCRGSGGDFSTYAFSWVRQAPGQGLEWMGRIIPILGIANYAQKFQGRVTITADKSTSTAYMELSSLRSDDTAVYYCARDGYGSDPVLWGQGTLVTVSS

SEQ ID NO: 1535 - DNA, 333 bp, Artificial Sequence
  Variable light chain of Ab-56
aattttatgctgactcagccccactctgtgtcggggtctccggggaagacggtaaccctcccctgcacccgcagcagtggcagcattgccagccactatgtccagtggtaccagcagcgcccgggcagtgcccccaccactgtgatctatgaggataacaagagaccctctggggtccctgatcggttctctggctccatcgacagctcctccaactctgcctccctcagcatctctggactgaagactgaggacgaggctgactactactgtcagtcttatgatagcagcaatcgttgggtgttcggcggagggaccaagctgaccgtccta

SEQ ID NO: 1536 - protein, 111 aa, Artificial Sequence
  Variable light chain of Ab-56
NFMLTQPHSVSGSPGKTVTLPCTRSSGSIASHYVQWYQQRPGSAPTTVIYEDNKRPSGVPDRFSGSIDSSSNSASLSISGLKTEDEADYYCQSYDSSNRWVFGGGTKLTVL

SEQ ID NO: 1537 - DNA, 354 bp, Artificial Sequence
  Variable heavy chain of Ab-65
gaggtgcagctggtgcagtctggagctgaggtgaagaagcctggggcctcagtgaaggtctcctgcaaggcttctggttacacctttaccaactatggtatcagctgggtgcgacaggcccctggacaagggcttgagtggatgggatggatcagcgcttacaatggtaacacaaactatgcacagaaggtccagggcagagtcaccatgaccacagacacatccacgagcacaggctacatggagctgaggagcctgagatctgacgacacggccgtgtattactgtgcgagaggagattttcggaaaccctttgactactggggccagggaaccctggtcaccgtctcctca

SEQ ID NO: 1538 - protein, 118 aa, Artificial Sequence
  Variable heavy chain of Ab-65
EVQLVQSGAEVKKPGASVKVSCKASGYTFTNYGISWVRQAPGQGLEWMGWISAYNGNTNYAQKVQGRVTMTTDTSTSTGYMELRSLRSDDTAVYYCARGDFRKPFDYWGQGTLVTVSS

SEQ ID NO: 1539 - DNA, 345 bp, Artificial Sequence
  Variable light chain of Ab-65
ctgcctgtgctgactcagccggcttccctctctgcatcccccggagcatcagccagtctcacctgcaccttacgcagtggcctcaatgttggttcctacaggatatactggtaccagcagaagccagggagtcgtccccagtatctcctgaactacaaatcagactcaaataaacagcaggcctctggagtccccagccgcttctctggatccaaggatgcttcggccaatgcagggattttactcatctccgggctccagtctgaggatgaggctgactattactgtatgatttggtacagcagcgctgtggtattcggcggagggaccaagctgaccgtccta

SEQ ID NO: 1540 - protein, 115 aa, Artificial Sequence
  Variable light chain of Ab-65
LPVLTQPASLSASPGASASLTCTLRSGLNVGSYRIYWYQQKPGSRPQYLLNYKSDSNKQQASGVPSRFSGSKDASANAGILLISGLQSEDEADYYCMIWYSSAVVFGGGTKLTVL

SEQ ID NO: 1541 - protein, 5 aa, Artificial Sequence
  Heavy chain CDR1 consensus, Ab-42
SYAIS

SEQ ID NO: 1542 - protein, 5 aa, Artificial Sequence
  Heavy chain CDR1 of Ab-14, Ab-55
SYGIS

SEQ ID NO: 1543 - protein, 5 aa, Artificial Sequence
  Heavy chain CDR1 of Ab-16
SYALS

SEQ ID NO: 1544 - protein, 5 aa, Artificial Sequence
  Heavy chain CDR1 of Ab-22
DYAMH

SEQ ID NO: 1545 - protein, 5 aa, Artificial Sequence
  Heavy chain CDR1 of Ab-30
NYDMS

SEQ ID NO: 1546 - protein, 5 aa, Artificial Sequence
  Heavy chain CDR1 of Ab-31
GLYIH

SEQ ID NO: 1547 - protein, 5 aa, Artificial Sequence
  Heavy chain CDR1 of Ab-32
DNAIS

SEQ ID NO: 1548 - protein, 5 aa, Artificial Sequence
  Heavy chain CDR1 of Ab-38
SYAMS

SEQ ID NO: 1549 - protein, 5 aa, Artificial Sequence
  Heavy chain CDR1 of Ab-46
TYALN

SEQ ID NO: 1550 - protein, 5 aa, Artificial Sequence
  Heavy chain CDR1 of Ab-50
SHGIT

SEQ ID NO: 1551 - protein, 5 aa, Artificial Sequence
  Heavy chain CDR1 Ab-52
RHGMH

SEQ ID NO: 1552 - protein, 5 aa, Artificial Sequence
  Heavy chain CDR1 of Ab-56
TYAFS

SEQ ID NO: 1553 - protein, 5 aa, Artificial Sequence
  Heavy chain CDR1 of Ab-65
NYGIS

SEQ ID NO: 1554 - protein, 17 aa, Artificial Sequence
  Heavy chain CDR2 consensus
WISPIGGSTNYAQKVQG

SEQ ID NO: 1555 - protein, 17 aa, Artificial Sequence
  Heavy chain CDR2 of Ab-14
WISAYNGNTNYAQKLED

SEQ ID NO: 1556 - protein, 17 aa, Artificial Sequence
  Heavy chain CDR2 of Ab-16
AISGGGGSTYYADSVKD

SEQ ID NO: 1557 - protein, 17 aa, Artificial Sequence
  Heavy chain CDR2 of Ab-22
LISGDGGSTYYADSVKD

SEQ ID NO: 1558 - protein, 17 aa, Artificial Sequence
  Heavy chain CDR2 of Ab-30
RVNWNGGSTTYADAVKD

SEQ ID NO: 1559 - protein, 17 aa, Artificial Sequence
  Heavy chain CDR2 of Ab-31
WIIPIFGTANYAQKFED

SEQ ID NO: 1560 - protein, 17 aa, Artificial Sequence
  Heavy chain CDR2 of Ab-32
WIIPIFGKPNYAQKFED

SEQ ID NO: 1561 - protein, 17 aa, Artificial Sequence
  Heavy chain CDR2 of Ab-38
AISGSGGSTYYADSVKD

SEQ ID NO: 1562 - protein, 17 aa, Artificial Sequence
  Heavy chain CDR2 of Ab-42
WIIPIFGTANYAQKFED

SEQ ID NO: 1563 - protein, 17 aa, Artificial Sequence
  Heavy chain CDR2 of Ab-46
RIVPLIGLVNYAHNFED

SEQ ID NO: 1564 - protein, 17 aa, Artificial Sequence
  Heavy chain CDR2 of Ab-50
WISAHNGHASNAQKVED

SEQ ID NO: 1565 - protein, 17 aa, Artificial Sequence
  Heavy chain CDR2 of Ab-52
VISHDGSVKYYADSMKD

SEQ ID NO: 1566 - protein, 17 aa, Artificial Sequence
  Heavy chain CDR2 of Ab-55
WTSPHNGLTAFAQILED

SEQ ID NO: 1567 - protein, 17 aa, Artificial Sequence
  Heavy chain CDR2 of Ab-56
RIIPILGIANYAQKFED

SEQ ID NO: 1568 - protein, 17 aa, Artificial Sequence
  Heavy chain CDR2 of Ab-65
WISAYNGNTNYAQKVED

SEQ ID NO: 1569 - protein, 19 aa, Artificial Sequence
  Heavy chain CDR3 consensus
  misc_feature (3)..(17): Xaa can be any naturally occurring amino acid
GLXXXXXXXXXXXXXXXDV

SEQ ID NO: 1570 - protein, 15 aa, Artificial Sequence
  Heavy chain CDR3 of Ab-14
ALPSGTILVGGWFDP

SEQ ID NO: 1571 - protein, 15 aa, Artificial Sequence
  Heavy chain CDR3 of Ab-16
DVFPETFSMNYGMDV

SEQ ID NO: 1572 - protein, 19 aa, Artificial Sequence
  Heavy chain CDR3 of Ab-22
VLLPCSSTSCYGSVGAFDI

SEQ ID NO: 1573 - protein, 8 aa, Artificial Sequence
  Heavy chain CDR3 of Ab-30
EFVGAYDL

SEQ ID NO: 1574 - protein, 12 aa, Artificial Sequence
  Heavy chain CDR3 of Ab-31
GLRWGIWGWFDP

SEQ ID NO: 1575 - protein, 12 aa, Artificial Sequence
  Heavy chain CDR3 of Ab-32
TMVRGFLGVMDV

SEQ ID NO: 1576 - protein, 16 aa, Artificial Sequence
  Heavy chain CDR3 of Ab-38
DQFVTIFGVPRYGMDV

SEQ ID NO: 1577 - protein, 11 aa, Artificial Sequence
  Heavy chain CDR3 of Ab-42
GRQMFGAGIDF

SEQ ID NO: 1578 - protein, 9 aa, Artificial Sequence
  Heavy chain CDR3 of Ab-46
EVYGGNSDY

SEQ ID NO: 1579 - protein, 11 aa, Artificial Sequence
  Heavy chain CDR3 of Ab-50
VHAALYYGMDV

SEQ ID NO: 1580 - protein, 12 aa, Artificial Sequence
  Heavy chain CDR3 of Ab-52
GLSYQVSGWFDP

SEQ ID NO: 1581 - protein, 11 aa, Artificial Sequence
  Heavy chain CDR3 of Ab-55
VHPVFSYALDV

SEQ ID NO: 1582 - protein, 9 aa, Artificial Sequence
  Heavy chain CDR3 of Ab-56
DGYGSDPVL

SEQ ID NO: 1583 - protein, 9 aa, Artificial Sequence
  Heavy chain CDR3 of Ab-65
GDFRKPFDY

SEQ ID NO: 1584 - protein, 13 aa, Artificial Sequence
  Light chain CDR1 consensus
TRSSGSIGSNYVQ

SEQ ID NO: 1585 - protein, 13 aa, Artificial Sequence
  Light chain CDR1 of Ab-14
TRSSGNIASNYVQ

SEQ ID NO: 1586 - protein, 11 aa, Artificial Sequence
  Light chain CDR1 of Ab-16
QGDSLRSYYAS

SEQ ID NO: 1587 - protein, 11 aa, Artificial Sequence
  Light chain CDR1 of Ab-22
GGSDIGRKSVH

SEQ ID NO: 1588 - protein, 14 aa, Artificial Sequence
  Light chain CDR1 of Ab-30
TGTSSDVGGYNYVS

SEQ ID NO: 1589 - protein, 11 aa, Artificial Sequence
  Light chain CDR1 of Ab-31
RASQSIGNSLA

SEQ ID NO: 1590 - protein, 11 aa, Artificial Sequence
  Light chain CDR1 of Ab-32
RASQGIGSYLA

SEQ ID NO: 1591 - protein, 11 aa, Artificial Sequence
  Light chain CDR1 of Ab-38
SGDKLGNKYAY

SEQ ID NO: 1592 - protein, 13 aa, Artificial Sequence
  Light chain CDR1 of Ab-42
TRSSGSIDSNYVQ

SEQ ID NO: 1593 - protein, 13 aa, Artificial Sequence
  Light chain CDR1 of Ab-46
TRSSGNIGTNYVQ

SEQ ID NO: 1594 - protein, 11 aa, Artificial Sequence
  Light chain CDR1 of Ab-50
GGNNIGSKGVH

SEQ ID NO: 1595 - protein, 13 aa, Artificial Sequence
  Light chain CDR1 of Ab-52
TRSSGSIASNYVQ

SEQ ID NO: 1596 - protein, 13 aa, Artificial Sequence
  Light chain CDR1 of Ab-55
TRSSGSIASNYVQ

SEQ ID NO: 1597 - protein, 13 aa, Artificial Sequence
  Light chain CDR1 of Ab-56
TRSSGSIASHYVQ

SEQ ID NO: 1598 - protein, 14 aa, Artificial Sequence
  Light chain CDR1 of Ab-65
TLRSGLNVGSYRIY

SEQ ID NO: 1599 - protein, 7 aa, Artificial Sequence
  Light chain CDR2 of consensus, Ab-14, Ab-42, Ab-52, Ab-55
EDNQRPS

SEQ ID NO: 1600 - protein, 7 aa, Artificial Sequence
  Light chain CDR2 of Ab-16
GKNNRPS

SEQ ID NO: 1601 - protein, 7 aa, Artificial Sequence
  Light chain CDR2 of Ab-22
SDRDRPS

SEQ ID NO: 1602 - protein, 7 aa, Artificial Sequence
  Light chain CDR2 of Ab-30
DVSNRPS

SEQ ID NO: 1603 - protein, 7 aa, Artificial Sequence
  Light chain CDR2 of Ab-31
GASSRAT

SEQ ID NO: 1604 - protein, 7 aa, Artificial Sequence
  Light chain CDR2 of Ab-32
AASTLQS

SEQ ID NO: 1605 - protein, 7 aa, Artificial Sequence
  Light chain CDR2 of Ab-38
QDIKRPS

SEQ ID NO: 1606 - protein, 7 aa, Artificial Sequence
  Light chain CDR2 of Ab-46
EDYRRPS

SEQ ID NO: 1607 - protein, 7 aa, Artificial Sequence
  Light chain CDR2 of Ab-50
DDSDRPS

SEQ ID NO: 1608 - protein, 7 aa, Artificial Sequence
  Light chain CDR2 of Ab-56
EDNKRPS

SEQ ID NO: 1609 - protein, 11 aa, Artificial Sequence
  Light chain CDR2 of Ab-65
YKSDSNKQQAS

SEQ ID NO: 1610 - protein, 9 aa, Artificial Sequence
  Light chain CDR3 consensus
QSYDSSTWV

SEQ ID NO: 1611 - protein, 10 aa, Artificial Sequence
  Light chain CDR3 of Ab-14
QSYDSSNLWV

SEQ ID NO: 1612 - protein, 11 aa, Artificial Sequence
  Light chain CDR3 of Ab-16
NSRDSSGNHYV

SEQ ID NO: 1613 - protein, 11 aa, Artificial Sequence
  Light chain CDR3 of Ab-22
QVWDNNSDHYV

SEQ ID NO: 1614 - protein, 9 aa, Artificial Sequence
  Light chain CDR3 of Ab-30
SSYTSSTLP

SEQ ID NO: 1615 - protein, 9 aa, Artificial Sequence
  Light chain CDR3 of Ab-31
QQHTIPTFS

SEQ ID NO: 1616 - protein, 9 aa, Artificial Sequence
  Light chain CDR3 of Ab-32
QQLNNYPIT

SEQ ID NO: 1617 - protein, 8 aa, Artificial Sequence
  Light chain CDR3 of Ab-38
QTWDNSVV

SEQ ID NO: 1618 - protein, 11 aa, Artificial Sequence
  Light chain CDR3 of Ab-42
QSYDSNNRHVI

SEQ ID NO: 1619 - protein, 9 aa, Artificial Sequence
  Light chain CDR3 of Ab-46
QSYHSSGWE

SEQ ID NO: 1620 - protein, 11 aa, Artificial Sequence
  Light chain CDR3 of Ab-50
QVWDSSSDHWV

SEQ ID NO: 1621 - protein, 10 aa, Artificial Sequence
  Light chain CDR3 of Ab-52
QSYDSTTPSV

SEQ ID NO: 1622 - protein, 9 aa, Artificial Sequence
  Light chain CDR3 of Ab-55
QSYDGITVI

SEQ ID NO: 1623 - protein, 10 aa, Artificial Sequence
  Light chain CDR3 of Ab-56
QSYDSSNRWV

SEQ ID NO: 1624 - protein, 9 aa, Artificial Sequence
  Light chain CDR3 of Ab-65
MIWYSSAVV

SEQ ID NO: 1625 - DNA, 717 bp, Homo sapiens
gaggtgcagctggtgcagtctgggggaggcgtggtccagcctgggaagtccctgagactctcctgtgcagcctctggattcgccttcagtagttatgctatgcactgggtccgccaggctccaggcaaggggctggagtgggtggcagttatatcatatgatggaagtaataaatactacgcagactccgtgaagggccgattcaccatctccagagacaattccaagaacacgctgtatctgcaaatgaacagcctgagagctgaggacacggctgtgtattactgtgcgagggacaggagctactaccttgactactggggccagggaaccctggtcaccgtctcctcaggtggcggcggttccggaggtggtggttctggcggtggtggcagcgaaacgacactcacgcagtctccagccaccctgtctttgtctccaggggaaagggccaccctctcctgcagggccagtcagagtgttaggagcaacttagcctggtaccagcagaaacctggccaggctcccaggcccctcatctatgatgcatccaccagggccactggcatcccagacaggttcagtggcagtgggtctgggacagacttcactctcaccatcagcagactggagcctgaagattttgcagtttattactgtcagcagcgtagcaactggcctccgacgttcggccaagggaccaaggtggaagtcaaa

SEQ ID NO: 1626 - DNA, 351 bp, Homo sapiens
gaggtgcagctggtgcagtctgggggaggcgtggtccagcctgggaagtccctgagactctcctgtgcagcctctggattcgccttcagtagttatgctatgcactgggtccgccaggctccaggcaaggggctggagtgggtggcagttatatcatatgatggaagtaataaatactacgcagactccgtgaagggccgattcaccatctccagagacaattccaagaacacgctgtatctgcaaatgaacagcctgagagctgaggacacggctgtgtattactgtgcgagggacaggagctactaccttgactactggggccagggaaccctggtcaccgtctcctca

SEQ ID NO: 1627 - DNA, 987 bp, Homo sapiens
gctagcaccaagggcccatcggtcttccccctggcaccctcctccaagagcacctctgggggcacagcggccctgggctgcctggtcaaggactacttccccgaaccggtgacggtgtcgtggaactcaggcgccctgaccagcggcgtgcacaccttcccggctgtcctacagtcctcaggactctactccctcagcagcgtggtgaccgtgccctccagcagcttgggcacccagacctacatctgcaacgtgaatcacaagcccagcaccaaggtggacaagaaagcagagcccaaatcttgtgacaaaactcacacatccccaccgtgcccagcacctgaactcctggggggaccgtcagtcttcctcttccccccaaaacccaaggacaccctcaggatctcccggacccctgaggtcacatgcgtggtggtggacgtgagccacgaagaccctgaggtcaagttcaactggtacgtggacggcgtggaggtgcataatgccaagacaaagccgcgggaggagcagtacagcacgtaccgggtggtcagcgtcctcaccgtcctgcaccaggactggctgaatggcaaggagtacaagtgcaaggtctccaacaaagccctcccagcccccatcgagaaaaccatctccaaagccaaagggcagccccgagaaccacaggtgtacaccctgcccccatcccgggatgagctgaccaagaaccaggtcagcctgacctgcctggtcaaaggcttctatcccagcgacatcgccgtggagtgggagagcaatgggcagccggagaacaactacaagaccacgcctcccgtgctggactccgacggctccttcttcctctacagcaagctcaccgtggacaagagcaggtggcagcaggggaacgtcttctcatgctccgtgatgcatgaggctctgcacaaccactacacgcagaagagcctctccctgtctccgggtaaatga

SEQ ID NO: 1628 - DNA, 318 bp, Homo sapiens
acgacactcacgcagtctccagccaccctgtctttgtctccaggggaaagggccaccctctcctgcagggccagtcagagtgttaggagcaacttagcctggtaccagcagaaacctggccaggctcccaggcccctcatctatgatgcatccaccagggccactggcatcccagacaggttcagtggcagtgggtctgggacagacttcactctcaccatcagcagactggagcctgaagattttgcagtttattactgtcagcagcgtagcaactggcctccgacgttcggccaagggaccaaggtggaagtcaaa

SEQ ID NO: 1629 - DNA, 348 bp, Homo sapiens
gatggtaccaaggtggaaatcaaacgtacggtggctgcaccatctgtcttcatcttcccgccatctgatgagcagttgaaatctggaactgcctctgttgtgtgcctgctgaataacttctatcccagagaggccaaagtacagtggaaggtggataacgccctccaatcgggtaactcccaggagagtgtcacagagcaggacagcaaggacagcacctacagcctcagcagcaccctgacgctgagcaaagcagactacgagaaacacaaagtctacgcctgcgaagtcacccatcagggcctgagctcgcccgtcacaaagagcttcaacaggggagagtgttga

SEQ ID NO: 1630 - protein, 102 aa, Homo sapiens
QVQLVQSGGGVPGSLRLSCAASGFTFSSYMSWVRQAPGKGLEWVISGSYYADSVKGRFTISRDNSKNTLYLQMNSLRAEDTAVYYCARDDYWGQGTLVTVSS

SEQ ID NO: 1631 - protein, 116 aa, Homo sapiens
QVQLVQSGGGVVQPGRSLRLSCAASGFTVSSNYMSWVRQAPGKGLEWVSVIYSGGSTYYADSVKGRFTISRDNSKNTLYLQMNSLRAEDTAVYYCAKDYGEGFDYWGQGTLVTVSS

SEQ ID NO: 1632 - protein, 117 aa, Homo sapiens
EVQLVQSGGGLVKPGGSLRLSCAASGFTFSDYYMSWIRQAPGKGLEWVSYISSSGSTIYYADSVKGRFTISRDNAKNSLYLQMNSLRAEDTGVYYCARDWGYSFGDWGQGTLVTVSS

SEQ ID NO: 1633 - protein, 127 aa, Homo sapiens
QVQLVQSGAEVKKPGASVKVSCKASGYTFTTYGISWVRQAPGQGLEWMGWISAYNGNTNYAQKLQGRVTMTTDTSTSTAYMELRSLRSDDTAVYYCARVGYYGDYAWGYYYYGMDVWGQGTLVTVSS

SEQ ID NO: 1634 - protein, 122 aa, Homo sapiens
QVQLQESGGGLVKPGGSLRLSCAASGFTFSDYYMSWIRQAPGKGLEWVSYISSSGSTIYYADSVKGRFTISRDNAKNSLYLQMNSLRAEDTAVYYCARERWLQIGEDAFDIWGQGTTVTVSS

SEQ ID NO: 1635 - protein, 116 aa, Homo sapiens
QVQLVQSGGGLIQPGGSLRLSCAASGFTVSSNYMSWVRQAPGKGLEWVSVIYSGGSTYYADSVKGRFTISRDNSKNTLYLQMNSLRAEDTAVYYCARNFGEDFDYWGQGTLVTVSS

SEQ ID NO: 1636 - protein, 117 aa, Homo sapiens
EVQLVQSGGGVVQPGKSLRLSCAASGFAFSSYAMHWVRQAPGKGLEWVAVISYDGSNKYYADSVKGRFTISRDNSKNTLYLQMNSLRAEDTAVYYCARDRSYYLDYWGQGTLVTVSS

SEQ ID NO: 1637 - protein, 124 aa, Homo sapiens
QVQLVQSGGGLVQPGGSLRLSCAASGFTFSSSWMSWVRQAPGKGLEWVAYIKQDGSEKYYVDSVKGRFTISRDNAKNSLYLQMDSLRAEDTAVYYCARDQGWGWDGTEYYSDYWGQGTLVTVSS

SEQ ID NO: 1638 - protein, 123 aa, Homo sapiens
QVQLVQSGAEVKKPGASVKVSCKASGYTFTSYGISWVRQAPGQGLEWMGWISAYNGNTNYAQKLQGRVTMTTDTSTSTAYMELRSLRSDDTAVYYCARDDLSDYGEWLGPDYWGQGTLVTVSS

SEQ ID NO: 1639 - protein, 81 aa, Homo sapiens
QLTQPSSGSPGQRTISCGSSGNVSWYQQPGAPKLLIYRPSGVPDRFSGSKSGTASLTISGLQEDEADYYCVFGGTKLTVLG

SEQ ID NO: 1640 - protein, 106 aa, homo sapiens
IQMTQSPSSLSASVGDRVTITCRATQSISTHLNWYQQRGGKAPKLLIYGASTLESGVPSRFSGSGSGTEFTLTISSLQPEDFATYYCLQHRSYPWTFGQGTNVEIK

SEQ ID NO: 1641 - protein, 112 aa, Homo sapiens
SYELTQPPSASGTPGQRVTISCSGSSSSIGSETVNWYQQLPGTAPKLLIYSNNQRPSGVPDRFSGSKSGTSASLAISGLQSEDEADYYCTAWDDTLNGRVIFGGGTKLTVLG

SEQ ID NO: 1642 - protein, 111 aa, Homo sapiens
QTVVTQEPSFSVSPGGTITLTCDLNSGLVSSSHYPSWYQQTPGQAPRTLIYNTNIRSSGVPDRFSGAILGNKAALTITGAQAEDESDYYCVLYMGSGISVFGGGTKLTVLG

SEQ ID NO: 1643 - protein, 111 aa, Homo sapiens
QSALTQPASVSGSPGQSITISCTGTSSDLGGHNFVSWYQQHPGKAPKLMIYDVFNRPSGVSSRFSGSKSGNTASLTISGLQAEDEADYFCSSYTITNIVVFGRGTKLTVLG

SEQ ID NO: 1644 - protein, 106 aa, Homo sapiens
TTLTQSPATLSLSPGERATLSCRASQSVRSNLAWYQQKPGQAPRPLIYDASTRATGIPDRFSGSGSGTDFTLTISRLEPEDFAVYYCQQRSNWPPTFGQGTKVEVK

SEQ ID NO: 1645 - protein, 111 aa, Homo sapiens
QSALTQPASVSGSPGQSITISCTGTSSDVGGYNYVSWYQQHPGKAPKLMIYDVSKRPSGVPDRFSGSKSGNTASLTISGLQAEDEADYFCSSYTITDIVVFGGGTKLTVLR

SEQ ID NO: 1646 - protein, 111 aa, Homo sapiens
QPGLTQPPSASGTPGQRVTISCSGSRSNIGGNTVNWYQHVPGTAPKLLIYSNNQRPSGVPDRFSGSKSGTSASLAISGLRSEDEAEYYCATWEDSLSGYVFGPGTKVTVLG

SEQ ID NO: 1647 - protein, 15 aa, Homo sapiens
RTMHPSDEFLPLGMP

SEQ ID NO: 1648 - protein, 15 aa, Homo sapiens
VVPLGRCVSHPAICA

SEQ ID NO: 1649 - protein, 15 aa, Homo sapiens
SVDDCRWNLNCEPPP

SEQ ID NO: 1650 - protein, 13 aa, Homo sapiens
CLSATCDCTLCGP

SEQ ID NO: 1651 - protein, 15 aa, Homo sapiens
GTGLVPLFDPRYRFL

SEQ ID NO: 1652 - protein, 15 aa, Homo sapiens
PNCWVGLTGAHSCFL

SEQ ID NO: 1653 - protein, 14 aa, Homo sapiens
YQADCLMNRCPTAE

SEQ ID NO: 1654 - protein, 669 aa, Homo sapiens
MFIFLLFLTLTSGSDLDRCTTFDDVQAPNYTQHTSSMRGVYYPDEIFRSDTLYLTQDLFLPFYSNVTGFHTINHTFGNPVIPFKDGIYFAATEKSNVVRGWVFGSTMNNKSQSVIIINNSTNVVIRACNFELCDNPFFAVSKPMGTQTHTMIFDNAFNCTFEYISDAFSLDVSEKSGNFKHLREFVFKNKDGFLYVYKGYQPIDVVRDLPSGFNTLKPIFKLPLGINITNFRAILTAFSPAQDIWGTSAAAYFVGYLKPTTFMLKYDENGTITDAVDCSQNPLAELKCSVKSFEIDKGIYQTSNFRVVPSGDVVRFPNITNLCPFGEVFNPSVYAWERKKISNCVADYSVLYNSTFFSTFKCYGVSATKLNDLCFSNVYADSFVVKGDDVRQIAPGQTGVIADYNYKLPDDFMGCVLAWNTRNIDATSTGNYNYKYRYLRHGKLRPFERDISNVPFSPDGKPCTPPALNCYWPLNDYGFYTTTGIGYQPYRVVVLSFELLNAPATVCGPKLSTDLIKNQCVNFNFNGLTGTGVLTPSSKRFQPFQQFGRDVSDFTDSVRDPKTSEILDISPCAFGGVSVITPGTNASSEVAVLYQDVNCTDVSTAIHADQLTPAWRIYSTGNNVFQTQAGCLIGAEHVDTSYECDIPIGAGICASYHTVSLLRSTSQKS

SEQ ID NO: 1655 - protein, 20 aa, Homo sapiens
RVVVLSFELGPPGGPFGEVF

SEQ ID NO: 1656 - protein, 14 aa, Homo sapiens
VVVSFELNLCPFGE

SEQ ID NO: 1657 - protein, 11 aa, Homo sapiens
  MISC_FEATURE (5)..(7): Wherein Xaa is any amino acid.
SFELXXXPFGE

SEQ ID NO: 1658 - protein, 13 aa, Homo sapiens
  MISC_FEATURE (5)..(9): Wherein Xaa is any amino acid.
SFELXXXXXPFGE

SEQ ID NO: 1659 - protein, 5 aa, Homo sapiens
VYDNK

SEQ ID NO: 1660 - protein, 5 aa, Homo sapiens
RSYYL

SEQ ID NO: 1661 - protein, 10 aa, Homo sapiens
RASQVRSNLA

SEQ ID NO: 1662 - protein, 6 aa, Homo sapiens
DASTAT

SEQ ID NO: 1663 - protein, 9 aa, Homo sapiens
QQRSNWPPT

SEQ ID NO: 1664 - protein, 13 aa, Homo sapiens
CLSATCDCTLCGP

SEQ ID NO: 1665 - protein, 9 aa, Artificial Sequence
  Synthetic Oligonucleotide
TETSQVAPA

SEQ ID NO: 1666 - DNA, 28 bp, Artificial Sequence
  Synthetic Oligonucleotide
tcgacgcgtgaggtgcagctggtgcagt

SEQ ID NO: 1667 - DNA, 29 bp, Artificial Sequence
  Synthetic Oligonucleotide
tcctctagacaggacggtgaccttggtcc

SEQ ID NO: 1668 - DNA, 81 bp, Artificial Sequence
  Synthetic Oligonucleotide
tagggcgcggccgcaaccgagaccagccaggtggcgcccgccgggggaggaggcagccccaccacgacgccagcgccgcga

SEQ ID NO: 1669 - DNA, 81 bp, Artificial Sequence
  Synthetic Oligonucleotide
tagggcgcggccgcaaccgagaccagccaggtggcgcccgccggcggaggaggcagcattgaagttatgtatcctcctcct

SEQ ID NO: 1670 - DNA, 41 bp, Artificial Sequence
  Synthetic Oligonucleotide
ctagccttaattaattagcgaggagggggcagggcctgcat

SEQ ID NO: 1671 - protein, 5 aa, Artificial Sequence
  Synthetic Oligonucleotide
GGGGS

SEQ ID NO: 1672 - protein, 14 aa, Artificial Sequence
  Synthetic Oligopeptide
TETSQVQPQGGGGS

SEQ ID NO: 1673 - protein, 9 aa, Artificial Sequence
  Synthetic Oligopeptide
TETSQVQPQ
